(19) United States
(12) Patent Application Publication
(10) Pub. No.: US 2024/0117446 A1
(43) Pub. Date: Apr. 11, 2024

(54) FAST DIAGNOSIS AND PERSONALIZED TREATMENTS FOR ACNE

(71) Applicant: The Regents of the University of California, Oakland, CA (US)

(72) Inventors: Huiying Li, Los Angeles, CA (US); Shuta Tomida, Santa Monica, CA (US); Robert L. Modlin, Sherman Oaks, CA (US); Jeffery F. Miller, Santa Monica, CA (US); Sorel T. Fitz-Gibbon, Los Angeles, CA (US)

(21) Appl. No.: 18/217,206

(22) Filed: Jun. 30, 2023

Related U.S. Application Data
(62) Division of application No. 17/033,034, filed on Sep. 25, 2020, now Pat. No. 11,692,229.
Application No. 17/033,034 is a continuation of application No. 16/390,575, filed on Apr. 22, 2019, now abandoned.
Application No. 16/390,575 is a continuation of application No. 15/257,423, filed on Sep. 6, 2016, now Pat. No. 10,364,473.
Application No. 15/257,423 is a division of application No. 14/385,576, filed on Sep. 16, 2014, now abandoned.
(60) Provisional application No. 61/612,290, filed on Mar. 17, 2012.

(51) Int. Cl. C12Q 1/689; A61K 35/741; A61K 35/76; A61K 39/02; A61K 39/05; C12N 7/00; C12Q 1/6883; C12Q 1/70

(52) U.S. Cl. CPC C12Q 1/689; A61K 35/741; A61K 35/76; A61K 39/0208; A61K 39/05; C12N 7/00; C12Q 1/6883; C12Q 1/701; C12N 2795/00032; C12Q 2600/112; C12Q 2600/156; C12Q 2600/16

(57) ABSTRACT

Methods of diagnosing and treating patients afflicted with acne, including diagnosing one as having acne if the individual possesses RT4, RT5, RT7, RT8, RT9, or RT10. Methods for treating acne include administering an effective amount of a drug specifically targeting RT4, RT5, RT7, RT8, RT9, or RT10, such as small molecules, antisense molecules, siRNAs, biologics, antibodies, phages, vaccines, or combination thereof.

### CROSS-REFERENCE TO RELATED APPLICATIONS

[0001] This application is a divisional application of U.S. patent application Ser. No. 17/033,034, filed Sep. 25, 2020, which is a continuation application of U.S. Patent Application 16/390575, filed Apr. 22, 2019, which is a continuation application of U.S. patent application Ser. No. 15/257,423, filed Sep. 6, 2016, which is a divisional application of U.S. National Stage application Ser. No. 14/385,576, filed Sep. 16, 2014, which claims priority to International Application No. PCT/US2013/032551, filed on Mar. 15, 2013, which claims priority to U.S. Provisional Patent Application No. 61/612,290, filed on Mar. 17, 2012, each of which is incorporated by reference herein in its entirety for all purposes.

### STATEMENT REGARDING FEDERALLY SPONSORED RESEARCH

[0002] This invention was made with government support under Grant Numbers AR057503 and GM099530, awarded by the National Institutes of Health. The government has certain rights in the invention.

### SEQUENCE LISTING

[0003] The instant application contains a Sequence Listing which has been submitted electronically in XML format and is hereby incorporated by reference in its entirety. Said XML file, created on Sep. 27, 2023, is named UCH-03705_SL.xml and is 3,028,105 bytes in size.

### BACKGROUND OF THE INVENTION

[0004] Acne is a skin condition that causes pimples or “zits.” This includes whiteheads, blackheads, and red, inflamed patches of skin (such as cysts). Acne occurs when tiny pores on the surface of the skin become clogged. Each pore opens to a follicle. A follicle contains a hair and an oil gland. The oil released by the gland helps remove old skin cells and keeps your skin soft. When glands produce too much oil, the pores can become blocked. Dirt, bacteria, and cells build up. The blockage is called a plug or comedone. If the top of the plug is white, it is called a whitehead. If the top of the plug is dark, it is called a blackhead. If the plug breaks open, swelling and red bumps occur. Acne that is deep in your skin can cause hard, painful cysts. This is called cystic acne.

[0005] Acne is most common in teenagers, but anyone can get acne. 85% of teenagers have acne. Hormonal changes may cause the skin to be more oily. Acne tends to run in families. It may be triggered by hormonal changes related to puberty, menstrual periods, pregnancy, birth control pills, or stress; greasy or oily cosmetic and hair products; certain drugs (such as steroids, testosterone, estrogen, and phenytoin); or high levels of humidity and sweating.

[0006] Various treatments exist for the treatment of acne. In general, acne treatments work by reducing oil production, speeding up skin cell turnover, fighting bacterial infection, reducing the inflammation or doing all four. These types of acne treatments include over-the-counter topical treatments, antibiotics, oral contraceptives and cosmetic procedures. Acne lotions may dry up the oil, kill bacteria and promote sloughing of dead skin cells. Over-the-counter (OTC) lotions are generally mild and contain benzoyl peroxide, sulfur, resorcinol, salicylic acid or sulfur as their active ingredient. Studies have found that using topical benzoyl peroxide along with oral antibiotics may reduce the risk of developing antibiotic resistance. Antibiotics may cause side effects, such as an upset stomach, dizziness or skin discoloration. These drugs also increase your skin's sun sensitivity and may reduce the effectiveness of oral contraceptives. For deep cysts, antibiotics may not be enough. Isotretinoin (Amnesteem, Claravis, Sotret) is a powerful medication available for scarring cystic acne or acne that doesn't respond to other treatments. However, isotretinoin has many side effects, such as dry skin, depression, severe stomach pain, and muscle/joint/back pain, and can cause birth defects in babies whose mothers use isotretinoin. Oral contraceptives, including a combination of norgestimate and ethinyl estradiol (Ortho Tri-Cyclen, Previfem, others), can improve acne in women. However, oral contraceptives may cause other side effects, such as headaches, breast tenderness, nausea, and depression. Chemical peels and microdermabrasion may be helpful in controlling acne. These cosmetic procedures, which have traditionally been used to lessen the appearance of fine lines, sun damage, and minor facial scars, are most effective when used in combination with other acne treatments. They may cause temporary, severe redness, scaling and blistering, and long-term discoloration of the skin.

[0007] In addition to the negative side-effects caused by the currently available treatments, there is no treatment available that is personalized to patients to target specific bacteria causing acne on an individual level. Additionally, it will be useful for dermatologists to know which strains are dominant on the skin of a patient at the time of diagnosis in order to personalize acne treatments. Thus, there exists a need in the art for methods of personalized diagnoses and treatment of acne.

### BRIEF SUMMARY OF THE INVENTION

[0008] The present invention is directed to methods of diagnosis and personalized treatment in patients afflicted with acne.

[0009] In one embodiment, the invention provides a method for determining whether an individual possesses acne comprising: obtaining a skin sample from an individual; isolating bacterial DNA from said sample; amplifying 16S ribosomal DNA in said sample; sequencing said amplified DNA products; and typing the individual's DNA based on one or more of the ten major ribotypes (RTs) of P. acnes strains, RT1-RT10 (SEQ ID NOs 1-10), wherein said typing occurs by determining whether said individual possesses one or more of RT1-RT10 and wherein said individual is diagnosed as having acne if said individual possesses RT4, RT5, RT7, RT8, RT9, or RT10. For example, said individual may be diagnosed as having acne if said individual possesses RT4 (SEQ ID NO:4), RT5 (SEQ ID NO:5), or RT8 (SEQ ID NO:8).

[0010] In another embodiment, the invention provides a method for diagnosing different types of acne comprising: obtaining a skin sample from a subject; isolating bacterial DNA from said sample; amplifying 16S ribosomal DNA in said sample; sequencing said amplified DNA products; and typing the subject's DNA based on one or more of the five major microbiome types of P. acnes strains, wherein said subject is diagnosed as having acne if said subject is typed to microbiome IV or V.

[0011] In yet another embodiment, the invention provides a method for rapidly diagnosing acne comprising: obtaining a skin sample from a subject; isolating bacterial DNA from said sample; using one or more primer sets to amplify said DNA; and analyzing said amplified DNA for the presence of a sequence having at least 95% homology with at least one of SEQ ID NOs 29-32 and 82-434, wherein said subject is diagnosed as having acne if the presence of a sequence having at least 95% homology with at least one of SEQ ID NOs 29-32 and 82-434 exists. For example, said amplified DNA may be analyzed for the presence of a sequence having at least 99% homology with at least one of SEQ ID NOs 29-32 and 82-434 and wherein said subject is diagnosed as having acne if the presence of a sequence having at least 99% homology with at least one of SEQ ID NOs 29-32 and 82-434 exists. As another example, said amplified DNA may be analyzed for the presence of at least one of SEQ ID NOs 29-32 and 82-434 and wherein said subject is diagnosed as having acne if the presence of at least one of SEQ ID NOs 29-32 and 82-434 exists.

[0012] In another embodiment, the invention provides a method for rapidly diagnosing acne comprising: obtaining a skin sample from a subject; isolating bacterial DNA from said sample; using one or more primer sets to amplify said DNA; using one or more probes to detect said amplified DNA; and analyzing said probe signals for the presence of Locus 1 (at least one sequence having at least 95% homology to at least one of SEQ ID NOs 29 and 82-97), Locus 2 (at least one sequence having at least 95% homology to at least one of SEQ ID NOs 30 and 98-186), Locus 3 (at least one sequence having at least 95% homology to at least one of SEQ ID NOs 31 and 187-423), and/or Locus 4 (at least one sequence having at least 95% homology to at least one of SEQ ID NOs 32 and 424-434), wherein said subject is diagnosed as having acne if one or more of Loci 1-4 are present. For example, the signals may be analyzed for the presence of Locus 1, Locus 2, Locus 3, and/or Locus 4 based upon at least 99% homology or 100% homology.

[0013] In the foregoing methods, a primer of said primer sets may be selected from the group consisting of SEQ ID NOs 11, 12, 17, and 18 (for Locus 1), SEQ ID NOs 13, 14, 20, and 21 (for Locus 2), SEQ ID NOs 15, 16, 23, and 24 (for Locus 3), and SEQ ID NOs 26 and 27 (for Locus 4). In the foregoing methods, said probes may be SEQ ID NO:19 (for Locus 1), SEQ ID NO:22 (for Locus 2), SEQ ID NO:25 (for Locus 3), and SEQ ID NO:28 (for Locus 4).

[0014] In yet another embodiment, the invention provides a vaccine for the prevention and/or treatment of acne caused by P. acnes comprising a heat inactivated P. acnes strain, an attenuated protein of said strain, or combination thereof, wherein said strain is an RT4 strain, an RT5 strain, an RT7 strain, an RT8 strain, an RT9 strain, or an RT10 strain.

[0015] In yet another embodiment, the invention provides a vaccine for the prevention and/or treatment of acne caused by P. acnes comprising a heat inactivated P. acnes strain, an attenuated protein of said strain, or combination thereof identified to be specific to a subject based on 16S rDNA sequence analysis of the strains of P. acnes affecting said subject.

[0016] With regard to the vaccines, said heat inactivated P. acnes strain, attenuated protein, or combination thereof may be specific for at least one of unique genomic loci, regions, or sequences identified for the strains of P. acnes. Said heat inactivated P. acnes strain, attenuated protein, or combination thereof may be specific for at least one of Locus 1 (SEQ ID NOs 29 and 82-97), Locus 2 (SEQ ID NOs 30 and 98-186), Locus 3 (31 and 187-423), and Locus 4 (32 and 424-434).

[0017] In yet another embodiment, the invention provides a method for the personalized treatment of acne comprising determining the strains of P. acnes affecting a subject and treating said subject with an active ingredient directed to at least one detected strain of P. acnes, wherein the active ingredient comprises a drug targeting specific strains of P. acnes, wherein the targeting drug comprises small molecules, antisense molecules, siRNA, biologics, antibodies, and combinations thereof targeting genomic elements specific for strains of P. acnes associated with acne.

[0018] In yet another embodiment, the invention provides a method for treating acne comprising: administering an effective amount of a probiotic that comprises at least one strain of P. acnes that is associated with healthy or normal skin based on its 16S rDNA. Said strain may be an RT6 strain. Said strain may have at least 95% homology to SEQ ID NO:51, SEQ ID NO:52, SEQ ID NO:53, or SEQ ID NO:54, such as at least 99% homology or 100% homology.

[0019] In yet another embodiment, the invention provides a method for treating acne comprising: administering an effective amount of a metabolite produced by a strain of P. acnes that is associated with healthy or normal skin, wherein said metabolite is selected from the group comprising bacterial culture supernatant, cell lysate, proteins, nucleic acids, lipids, and other bacterial molecules. Said strain may be an RT6 strain.

[0020] Said strain may have at least 95% homology to SEQ ID NO:51, SEQ ID NO:52, SEQ ID NO:53, or SEQ ID NO:54, such as at least 99% homology or 100% homology.

[0021] In yet another embodiment, the invention provides a method for treating acne in a subject comprising: administering an effective amount of a drug specifically targeting RT4, RT5, RT7, RT8, RT9, or RT10, when said subject is determined to possess RT4, RT5, RT7, RT8, RT9, or RT10, respectively. The earlier-described methods may be performed prior to administration of said drug. Said drug may be a small molecule, antisense molecule, siRNA, biologic, antibody, or combination thereof.

[0022] In yet another embodiment, the invention provides a composition comprising at least one strain of P. acnes that is associated with healthy or normal skin. Said strain may be an RT6 strain. Said strain may have at least 95% homology to SEQ ID NO:51, SEQ ID NO:52, SEQ ID NO:53, or SEQ ID NO:54, such as at least 99% homology or 100% homology.

[0023] In yet another embodiment, the invention provides a method for diagnosing IB-3-based acne comprising: obtaining a skin sample from a subject; isolating bacterial DNA from said sample; using one or more primer sets to amplify said DNA; and analyzing said amplified DNA for the presence of a sequence having at least 95% homology with at least one of SEQ ID NOs 55-81, wherein said subject is diagnosed as having IB-3-based acne if the presence of a sequence having at least 95% homology with at least one of SEQ ID NOs 55-81 exists.

[0024] In yet another embodiment, the invention provides a method for the personalized treatment of acne comprising determining the strain(s) of acne affecting a subject and administering to said subject an effective amount of at least one phage specifically directed to said strain(s). For example, the subject may be treated with phage directed against an RT4 strain, an RT5 strain, an RT7 strain, and RT8 strain, an RT9 strain, and/or an RT10 strain.

[0025] In yet another embodiment, the invention provides a method for treating an individual suffering from acne of microbiome type I comprising administering to said individual an effective amount of a phage, wherein said phage is selected from the group consisting of: PHL113M01 (SEQ ID NO:36), PHL 11 M01 (SEQ ID NO:33), PHL082M00 (SEQ ID NO:47), PHL060L00 (SEQ ID NO:34), PHL067M10(SEQ ID NO:42), PHL071N05 (SEQ ID NO:41), PHL112N00 (SEQ ID NO:35), PHL037M02 (SEQ ID NO:40), PHL085N00 (SEQ ID NO:46), PHL115M02 (SEQ ID NO:43), PHL085M01 (SEQ ID NO:44), PHL114L00 (SEQ ID NO:37), PHL010M04 (SEQ ID NO:38), and PHL066M04 (SEQ ID NO:39).

[0026] In yet another embodiment, the invention provides a method for treating an individual suffering from acne of microbiome type I with IB-3 strain comprising administering to said individual an effective amount of a phage, wherein said phage is selected from the group consisting of: PHL082M00 (SEQ ID NO:47) and PHL071N05 (SEQ ID NO:41).

[0027] In yet another embodiment, the invention provides a method for treating an individual suffering from acne of microbiome type II comprising administering to said individual an effective amount of a phage, wherein said phage is selected from the group consisting of: PHL113M01 (SEQ ID NO:36), PHL060L00 (SEQ ID NO:34), PHL112N00 (SEQ ID NO:35), and PHL085M01 (SEQ ID NO:44).

[0028] In yet another embodiment, the invention provides a method for treating an individual suffering from acne of microbiome type 11 or dominant RT8 comprising administering to said individual an effective amount of a phage, wherein said phage is selected from the group consisting of: PHL113M01 (SEQ ID NO:36), PHL 11 M01 (SEQ ID NO:33), PHL082M00 (SEQ ID NO:47), PHL060L00 (SEQ ID NO:34), PHL067M10 (SEQ ID NO:42), PHL071N05 (SEQ ID NO:41), PHL112N00 (SEQ ID NO:35), PHL037M02 (SEQ ID NO:45), PHL085N00 (SEQ ID NO:46), PHL115M02 (SEQ ID NO:43), PHL085M01 (SEQ ID NO:44), PHL114L00 (SEQ ID NO:37), PHL073M02 (SEQ ID NO:40), PHL010M04 (SEQ ID NO:38), and PHL066M04 (SEQ ID NO:39).

[0029] In yet another embodiment, the invention provides a method for treating an individual suffering from acne of microbiome type IV comprising administering to said individual an effective amount of a phage, wherein said phage is selected from the group consisting of: PHL113M01 (SEQ ID NO:36), PHL 11 M01 (SEQ ID NO:33), PHL082M00 (SEQ ID NO:47), PHL060L00 (SEQ ID NO:34), PHL067M10(SEQ ID NO:42), PHL071N05 (SEQ ID NO:41), PHL112N00 (SEQ ID NO:35), PHL037M02 (SEQ ID NO:45), PHL085N00 (SEQ ID NO:46), PHL115M02 (SEQ ID NO:43), PHL085M01 (SEQ ID NO:44), PHL114L00 (SEQ ID NO:37), PHL073M02 (SEQ ID NO:40), PHL010M04 (SEQ ID NO:38), and PHL066M04 (SEQ ID NO:39).

[0030] In yet another embodiment, the invention provides a method for treating an individual suffering from acne of microbiome type V comprising administering to said individual an effective amount of a phage, wherein said phage is selected from the group consisting of: PHL113M01 (SEQ ID NO:36), PHL 11 M01 (SEQ ID NO:33), PHL082M00 (SEQ ID NO:47), PHL060L00 (SEQ ID NO:34), PHL067M10(SEQ ID NO:42), PHL071N05 (SEQ ID NO:41), PHL112N00 (SEQ ID NO:35), PHL037M02 (SEQ ID NO:45), PHL085N00 (SEQ ID NO:46), PHL115M02 (SEQ ID NO:43), PHL085M01 (SEQ ID NO:44), PHL114L00 (SEQ ID NO:37), PHL073M02 (SEQ ID NO:40), PHL010M04 (SEQ ID NO:38), and PHL066M04 (SEQ ID NO:39).

[0031] In yet another embodiment, the invention provides a method for treating a Propionibacterium humerusii-associated malady comprising administering to said individual an effective amount of a phage, wherein said phage is selected from the group consisting of: PHL113M01 (SEQ ID NO:36), PHL 11 M01 (SEQ ID NO:33), PHL082M00 (SEQ ID NO:47), PHL067M10 (SEQ ID NO:42), PHL071N05 (SEQ ID NO:41), PHL085N00 (SEQ ID NO:46), PHL085M01 (SEQ ID NO:44), PHL114L00 (SEQ ID NO:37), PHL073M02 (SEQ ID NO:40), and PHL010M04 (SEQ ID NO:38).

[0032] In yet another embodiment, the invention provides a kit for diagnosing acne in a subject, wherein said kit comprises: at least one primer selected from the group comprising SEQ ID NOs 11-18, 20, 21, 23, 24, 26, and 27; and instructions for use.

[0033] In yet another embodiment, the invention provides a kit for diagnosing acne in a subject, wherein said kit comprises: at least one primer selected from the group comprising SEQ ID NOs 11-18, 20, 21, 23, 24, 26, and 27; at least one probe selected from the group comprising SEQ ID NOs 19, 22, 25, and 28; and instructions for use.

### BRIEF DESCRIPTION OF THE FIGURES

[0034] This application file contains at least one drawing executed in color. Copies of this application with color drawing(s) will be provided by the Office upon request and payment of the necessary fee.

[0035] FIG. 1 shows that P. acnes dominates the microbiota of pilosebaceous units, accounting for 87% of the clones. P. acnes was dominant in pilosebaceous units in both acne patients and individuals with normal skin. By 16S rDNA sequencing, P. acnes sequences accounted for 87% of all the clones. Species with a relative abundance greater than 0.35% are listed in order of relative abundance. Species distribution from a metagenomic shotgun sequencing of pooled samples from normal individuals confirmed the high abundance of P. acnes in pilosebaceous units, as shown on the far right column.

[0036] FIG. 2 shows that the rank abundance of P. acnes ribotypes shows a distribution similar to that seen at the higher taxonomic levels. A few highly-abundant ribotypes and a large number of rare ribotypes were observed in the samples. Some ribotypes were highly enriched in acne patients. Only the top 30 most abundant ribotypes are reflected in FIG. 2.

[0037] FIG. 3 shows that the most abundant P. acnes ribotypes in pilosebaceous units were also abundant at other body sites. The major ribotypes found in acne patients and normal individuals were compared to the datasets from the HMP and Grice et aL. (2009). The top three ribotypes are the most abundant ones in different datasets. The excess RT4 and RT5 seen in the dataset by Grice et aL. (2009) was due to one subject, HV4, whose P. acnes strain population was dominated by these two ribotypes at every skin site sampled. After removal of this subject, the ribotype distribution is similar to the HMP samples and the normal skin samples studied. RT6 is also found abundant in the HMP dataset, which were collected from healthy individuals.

[0038] FIG. 4 shows that P. acnes population structures differ in acne and normal skin. P. acnes populations from samples were clustered using principal coordinates analysis of the weighted UniFrac distance matrix for the top ten most abundant ribotypes. The principal coordinate 1 (P1) explains 43.64% of the variation and P2 explains 20.07% of the variation. The analysis was performed using QIIME (Caporaso et aL. 2010).

[0039] FIG. 5 shows the distribution of the top ten most abundant P. acnes ribotypes in acne patients and individuals with normal skin. Each column represents the percentage of the top ten ribotypes identified in each subject. The average P. acnes clone number per subject was 262 and the average clone number of top ten ribotypes was 100. Five major microbiome types at the P. acnes strain level were observed in the data. Types IV and V were mostly found in acne patients. Two samples (one from acne, one from normal skin) with fewer than 50 P. acnes 16S rDNA sequences are not displayed.

[0040] FIG. 6 shows the distribution of the top ten most abundant P. acnes ribotypes in all samples without separating the two groups of acne and normal skin. Each column represents the percentage of the top ten ribotypes identified in each sample. When all samples were clustered, the same five major microbiome types at the P. acnes strain level were observed, indicating that microbiome classification does not depend on the states of the disease. Only three out of 99 samples were clustered differently compared to the one shown in FIG. 5 (marked with asterisks). Two samples, one from acne and one from normal skin, with fewer than 50 P. acnes 16S rDNA sequences are not shown.

[0041] FIG. 7 shows that the same five major microbiome types were observed in multiple datasets. Samples from the study, HMP, and Grice et aL. (2009) were clustered together based on the top ten most abundant P. acnes ribotypes. In total, 284 samples were included. Each column represents the percentage of the top ten ribotypes identified in each sample. Both HMP samples and samples from Grice et aL. (2009) were collected from healthy individuals, therefore the percentage of microbiome types IV and V are under-represented in the analysis. Samples with fewer than ten sequences of the top ten ribotypes were not included.

[0042] FIG. 8 indicates that the genome comparison of 71 P. acnes strains showed that the genomes of RT4 and RT5 are distinct from others. Two chromosomal regions, loci 1 and 2, are unique to clade IA-2 and one other genome HL086PA1. Clade IA-2 consists of mainly RT4 and RT5 that were highly enriched in acne. The presence of a plasmid (locus 3) is also characteristic of RT4 and RT5. Each row represents a P. acnes genome colored according to the ribotypes. Rows are ordered by the phylogeny calculated based on the SNPs in the P. acnes core genome. Only the topology is shown. The clades were named based on their recA types (IA, IB and II). Columns represent predicted open reading frames (ORFs) in the genomes and are ordered by ORF positions along the finished genome HL096PA1, which encodes a 55 Kb plasmid. Only the first 300 ORFs on the chromosome (on the left) and all the ORFs on the plasmid (on the right) are shown. The colored plasmid regions represent genes on contigs that match exclusively to the HL096PA1 plasmid region. The genes that fall on contigs that clearly extend beyond the plasmid region are likely to be chromosomally located and are colored in grey. Acne index for the ribotypes was calculated based on the percentage of clones of each ribotype found in acne as shown in column 5 in Table 2.

[0043] FIG. 9 shows the phylogentic tree constructed based on the 96,887 SNPs in P. acnes core genome, which shows that the 71 genomes cluster into distinct clades, consistent with recA types that have been used to classify P. acnes strains. The 16S ribotypes of the genomes represent the relationship of the lineages to a large extent. At one end of the tree, clades IA-2 and IB-1 mainly consist of the ribotypes enriched in acne, and at the other end of the tree, RT6 in clade II was mainly found in healthy subjects. Bootstrap test with 1,000 replicates were performed. The distances between the branches were calculated based on the SNPs in the core genome and do not represent the non-core regions of each genome. The enlarged branches were colored according to the 16S ribotypes as shown in FIG. 8.

[0044] FIG. 10 provides a genome comparison of 71 P. acnes strains and shows that the genomes of RT4 and RT5 are distinct from others. All of the predicted open reading frames (ORFs) encoded on the chromosome are shown. Each row represents a P. acnes genome colored according to the ribotypes. Rows are ordered by the phylogeny calculated based on the SNPs in P. acnes core genome. Only the topology is shown. Columns represent ORFs in the genomes and are ordered by their positions along the finished genome HL096PA1. Loci 1 and 2, which are unique to mainly RT4 and RT5 strains, and locus 4, which is unique to mainly RT8 strains, can be seen in the figure.

[0045] FIG. 11 provides a sequence coverage comparison between the chromosome and the plasmid region in all genomes harboring a putative plasmid, which shows that the copy number of plasmid ranges from 1 to 3 per genome. The X-axis represents the DNA sequences along the chromosome based on the coordinates of the finished genome HL096PA1, followed by plasmid sequences. The Y-axis represents the sequence coverage. The genomes were in the same order as in FIG. 8, except HL056PA1 (as a negative control).

[0046] FIG. 12 reflects that quantitative PCR (qPCR) confirmed that the copy number of plasmid in each genome is 1-3 as predicted from sequence coverage comparison. Pak and RecA are housekeeping genes located on the chromosome and TadA is a conserved gene in the Tad locus located on the plasmid. The copy number ratio between TadA and Pak ranges from 1 to 3 in genomes, while the ratio between RecA and Pak is 1 in all the genomes. The TadA gene in HL078PA1 and HL045PA1 had amplification in late cycles in qPCR. Conventional PCR confirmed the amplification of TadA in these two strains, while other strains without the plasmid showed no amplification (data not shown).

[0047] FIG. 13 shows a power law regression for new genes (n) discovered with the addition of new genome sequences (N). Circles are the medians of n for 200 simulations. Error bars indicate the standard deviations for the 200 simulations.

[0048] FIG. 14 shows a power law regression for total genes (n) accumulated with the addition of new genome sequences (N). Circles are the medians of n for 200 simulations. Error bars indicate the standard deviations for the 200 simulations.

[0049] FIG. 15 shows the proportion of the 123,223 SNPs in the core regions specific to recA types I, 11 and III.

[0050] FIG. 16 shows the phylogenetic tree of 82 P. acnes strains constructed based on the 123,223 SNPs in the core regions (2.20 Mb). The distances between strains were calculated as nucleotide substitution rates at all SNP sites, colored according to the scale bar. The strains from the same individuals (SSIs) belonging to the same lineages were marked with “+”.

[0051] FIG. 17 shows the pan-genomes of types IA (A), IB (B) and II (C) strains. Circles are the medians of n for 200 simulations. Error bars are standard deviations for the 200 simulations.

[0052] FIG. 18 shows the SNP distribution in core regions. (A) shows SNP frequencies (percentage of polymorphic sites) of the genes in the core regions. (B) provides K-S statistics for genes that had higher SNP frequencies with more than two standard deviations (SD). (C) reflects non-synonymous mutation frequencies of the genes in the core regions. (D) provides K-S statistics for genes that had higher non-synonymous mutation frequencies with more than 2 standard deviations.

[0053] FIG. 19 provides the distances between P. acnes strains in the same lineage (A) and in different lineages (B).

[0054] FIG. 20 reflects that P. acnes strains within each lineage share unique non-core genomic regions. Rows represent 82 P. acnes genomes and columns represent 314 non-core regions that are longer than 500 bp. The genomes and the non-core regions were clustered based on similarity, respectively. The width of each block plotted is not proportional to the genomic length of each non-core region. The presence of a non-core region is colored in yellow, and the absence is colored in blue. The color schemes used for RT and clades are the same as in FIG. 16.

[0055] FIG. 21 provides CRISPR spacer sequences in RT2 and RT6 strains. A total of 48 CRISPR spacer sequences were found in 11 P. acnes genomes, 29 of which were unique. Some CRISPR spacers were found in multiple strains. For example, spacer 2 (S2) was shared by HL060PA1 and HL082PA2. Spacer 17 (S17) was shared by J139, ATCC 11828, HL110PA3, HL110PA4, HL042PA3 and HL202PA1. Spacer 18 (S18) was shared by J139, ATC11828, HL110PA3, HL110PA4, and HL202PA1. The tree was from FIG. 16 constructed based on the 123,223 SNPs in the core regions.

[0056] FIG. 22 reflects genes with putative lipase activity in the P. acnes genomes. (A) gives a summary of 13 genes with putative lipase activity based on the annotations of KPA171202 and SK137 genomes. (B) reflects Insertions/deletions and frameshift observed in ORF HMPREF0675-4856. FIG. 22(B) discloses SEQ ID NOs 485-501, respectively, in order of appearance.

[0057] FIG. 23 reflects fast detection of acne associated P. acnes strains using multiplex PCR targeting loci 1, 2, and 3.

[0058] FIG. 24 shows the relative abundances of Locus 1 and Locus 2 as compared to the housekeeping gene Pak.

[0059] FIG. 25 reflects qPCR triplex amplification plots for clinical samples #1 (A) and #2 (B) showing amplification of P. acnes Locus 1, Locus 3, and Pak.

[0060] FIG. 26 shows the evolutionary relationships/phylogenetic tree of 32 phages.

[0061] FIG. 27 shows a diagram of the methods of the invention for the diagnosis and personalization of therapy for acne.

[0062] FIG. 28 shows a flow chart of the methods of the invention for the diagnosis and personalization of therapy for acne.

[0063] FIG. 29 provides P. acnes phage genomes and annotations. Genome organizations of all 15 phages are shown. Hatched arrows in previously published genomes represent newly annotated ORFs proposed. Italicized legend entries refer to newly-annotated or revised ORFs.

[0064] FIG. 30 provides a phylogenetic tree of 29 sequenced phage genomes constructed based upon the 6,148 SNPs in the core regions. Branches with bootstrap values less than 80 (based on 200 resamplings) were collapsed.

[0065] FIG. 31 provides phylogentic trees based on the genome sequences. (A) provides a phylogenetic tree constructed based on the entire genome sequences of all 16 phages. With the exception of PHL112N00, the phylogenetic relationships among the phages remain the same as using the core regions only, shown in FIG. 30. (B) shows the phylogenetic tree that was constructed using only the left-arm of the genomes, which are highly conserved among the phages. (C) shows the phylogenetic tree that was constructed using only the right-arm coding regions.

[0066] Groups I and II from FIG. 30 are also indicated in the trees. Branches with bootstrap values less than 80 (based on 5,000 resamplings) were collapsed.

[0067] FIG. 32 shows the phylogentic trees constructed based upon the nucleotide sequences of amidase (A) and head protein (B) from all phages, including the sequences from Lood et aL. The phylogenetic relationships among the phages from the previous study remain the same in these trees. Groups I and II remain the same as in the genome shown in FIG. 30.

[0068] FIG. 33 reflects multiple alignments generated for genomes from Groups I and II of closely-related phages. Sites of nucleotide variations are mapped to a member from each group. The density of variable sites in each 50-nt window of the genome is indicated in red, with 100% density indicating that all 50 sites in the window vary between the group members. (A) provides variations among Group I phages (PHL010M04, PHL066M04, PHL073M02) mapped to the PHL010M04 genome. (B) provides variation among Group II phages (PHL115M02, PHL085M01, PHL085N00, PHL037M02) mapped to the PHL115M02 genome. Gray arrows represent ORFs in each genome.

[0069] FIG. 34 shows host range and specificity of P. acnes phages. The susceptibility/resistance of 66 P. acnes strains, three P. humerusii strains, and one P. granulosum strain against 15 newly sequenced phages is shown. Dendrograms on the top and to the left represent the respective phylogenetic trees of the phages and P. acnes strains (only topology is shown). “S” indicates that the tested Propionibacterium strain was susceptible to the tested phage. Numbers in red represent the fold increase in resistance of the Propionibacteria strains against phages relative to P. acnes strain ATCC6919.

[0070] FIG. 35 provides a correlation between P. acnes resistance to phages and the presence of matched CRISPR spacers. The colored pixels in each cell represent the CRISPR spacers encoded in each P. acnes strain (shown in rows). Each red pixel means that this spacer has an exact protospacer match in the corresponding phage (shown in columns). Each orange pixel means that this spacer has a partially matched protospacer (one to two mismatches) in the corresponding phage. Gray pixels mean no matched protospacers. Pink cells indicate the bacterial resistance to the phages.

[0071] FIG. 36 reflects that each of the 15 sequenced phages was aligned to all 8 CRISPR spacer arrays identified in the P. acnes strains to identify protospacer sequences in each phage genome that have an exact match (red) or up to two mismatches (orange). Plus- and minus-strand protospacers are shown above and below the genomes, respectively.

[0072] FIG. 37 reflects sequence conservation in protospacers and PAMs. The protospacers that match exactly to the CRISPR spacers encoded in strain HL042PA3 and their associated PAM sequences are shown. Sequence conservation among the protospacer motifs from the phages that HL042PA3 is resistant to is shown in (A) and susceptible to is shown in (B).

### DETAILED DESCRIPTION

[0073] In one embodiment, the invention provides a method for determining whether an individual possesses acne comprising: obtaining a skin sample from an individual; isolating bacterial DNA from said sample; amplifying 16S ribosomal DNA in said sample; sequencing said amplified DNA products; and typing the individual's DNA based on one or more of the ten major ribotypes (RTs) of P. acnes strains, RT1-RT10 (SEQ ID NOs 1-10), wherein said typing occurs by determining whether said individual possesses one or more of RT1-RT10 and wherein said individual is diagnosed as having acne if said individual possesses RT4, RT5, RT7, RT8, RT9, or RT10. For example, said individual may be diagnosed as having acne if said individual possesses RT4 (SEQ ID NO:4), RT5 (SEQ ID NO:5), or RT8 (SEQ ID NO:8).

[0074] In another embodiment, the invention provides a method for diagnosing different types of acne comprising: obtaining a skin sample from a subject; isolating bacterial DNA from said sample; amplifying 16S ribosomal DNA in said sample; sequencing said amplified DNA products; and typing the subject's DNA based on one or more of the five major microbiome types of P. acnes strains, wherein said subject is diagnosed as having acne if said subject is typed to microbiome IV or V.

[0075] In yet another embodiment, the invention provides a method for rapidly diagnosing acne comprising: obtaining a skin sample from a subject; isolating bacterial DNA from said sample; using one or more primer sets to amplify said DNA; and analyzing said amplified DNA for the presence of a sequence having at least 95% homology with at least one of SEQ ID NOs 29-32 and 82-434, wherein said subject is diagnosed as having acne if the presence of a sequence having at least 95% homology with at least one of SEQ ID NOs 29-32 and 82-434 exists. For example, said amplified DNA may be analyzed for the presence of a sequence having at least 99% homology with at least one of SEQ ID NOs 29-32 and 82-434 and wherein said subject is diagnosed as having acne if the presence of a sequence having at least 99% homology with at least one of SEQ ID NOs 29-32 and 82-434 exists. As another example, said amplified DNA may be analyzed for the presence of at least one of SEQ ID NOs 29-32 and 82-434 and wherein said subject is diagnosed as having acne if the presence of at least one of SEQ ID NOs 29-32 and 82-434 exists.

[0076] In another embodiment, the invention provides a method for rapidly diagnosing acne comprising: obtaining a skin sample from a subject; isolating bacterial DNA from said sample; using one or more primer sets to amplify said DNA; using one or more probes to detect said amplified DNA; and analyzing said probe signals for the presence of Locus 1 (at least one sequence having at least 95% homology to at least one of SEQ ID NOs 29 and 82-97), Locus 2 (at least one sequence having at least 95% homology to at least one of SEQ ID NOs 30 and 98-186), Locus 3 (at least one sequence having at least 95% homology to at least one of SEQ ID NOs 31 and 187-423), and/or Locus 4 (at least one sequence having at least 95% homology to at least one of SEQ ID NOs 32 and 424-434), wherein said subject is diagnosed as having acne if one or more of Loci 1-4 are present. For example, the signals may be analyzed for the presence of Locus 1, Locus 2, Locus 3, and/or Locus 4 based upon at least 99% homology or 100% homology.

[0077] In the foregoing methods, a primer of said primer sets may be selected from the group consisting of SEQ ID NOs 11, 12, 17, and 18 (for Locus 1), SEQ ID NOs 13, 14, 20, and 21 (for Locus 2), SEQ ID NOs 15, 16, 23, and 24 (for Locus 3), and SEQ ID NOs 26 and 27 (for Locus 4). In the foregoing methods, said probes may be SEQ ID NO:19 (for Locus 1), SEQ ID NO:22 (for Locus 2), SEQ ID NO:25 (for Locus 3), and SEQ ID NO:28 (for Locus 4).

[0078] In yet another embodiment, the invention provides a vaccine for the prevention and/or treatment of acne caused by P. acnes comprising a heat inactivated P. acnes strain, an attenuated protein of said strain, or combination thereof, wherein said strain is an RT4 strain, an RT5 strain, an RT7 strain, an RT8 strain, an RT9 strain, or an RT10 strain.

[0079] In yet another embodiment, the invention provides a vaccine for the prevention and/or treatment of acne caused by P. acnes comprising a heat inactivated P. acnes strain, an attenuated protein of said strain, or combination thereof identified to be specific to a subject based on 16S rDNA sequence analysis of the strains of P. acnes affecting said subject.

[0080] With regard to the vaccines, said heat inactivated P. acnes strain, attenuated protein, or combination thereof may be specific for at least one of unique genomic loci, regions, or sequences identified for the strains of P. acnes. Said heat inactivated P. acnes strain, attenuated protein, or combination thereof may be specific for at least one of Locus 1 (SEQ ID NOs 29 and 82-97), Locus 2 (SEQ ID NOs 30 and 98-186), Locus 3 (31 and 187-423), and Locus 4 (32 and 424-434).

[0081] In yet another embodiment, the invention provides a method for the personalized treatment of acne comprising determining the strains of P. acnes affecting a subject and treating said subject with an active ingredient directed to at least one detected strain of P. acnes, wherein the active ingredient comprises a drug targeting specific strains of P. acnes, wherein the targeting drug comprises small molecules, antisense molecules, siRNA, biologics, antibodies, and combinations thereof targeting genomic elements specific for strains of P. acnes associated with acne.

[0082] In yet another embodiment, the invention provides a method for treating acne comprising: administering an effective amount of a probiotic that comprises at least one strain of P. acnes that is associated with healthy or normal skin based on its 16S rDNA. Said strain may be an RT6 strain. Said strain may have at least 95% homology to SEQ ID NO:51, SEQ ID NO:52, SEQ ID NO:53, or SEQ ID NO:54, such as at least 99% homology or 100% homology.

[0083] In yet another embodiment, the invention provides a method for treating acne comprising: administering an effective amount of a metabolite produced by a strain of P. acnes that is associated with healthy or normal skin, wherein said metabolite is selected from the group comprising bacterial culture supernatant, cell lysate, proteins, nucleic acids, lipids, and other bacterial molecules. Said strain may be an RT6 strain.

[0084] Said strain may have at least 95% homology to SEQ ID NO:51, SEQ ID NO:52, SEQ ID NO:53, or SEQ ID NO:54, such as at least 99% homology or 100% homology.

[0085] In yet another embodiment, the invention provides a method for treating acne in a subject comprising: administering an effective amount of a drug specifically targeting RT4, RT5, RT7, RT8, RT9, or RT10, when said subject is determined to possess RT4, RT5, RT7, RT8, RT9, or RT10, respectively. The earlier-described methods may be performed prior to administration of said drug. Said drug may be a small molecule, antisense molecule, siRNA, biologic, antibody, or combination thereof.

[0086] In yet another embodiment, the invention provides a composition comprising at least one strain of P. acnes that is associated with healthy or normal skin. Said strain may be an RT6 strain. Said strain may have at least 95% homology to SEQ ID NO:51, SEQ ID NO:52, SEQ ID NO:53, or SEQ ID NO:54, such as at least 99% homology or 100% homology.

[0087] In yet another embodiment, the invention provides a method for diagnosing IB-3-based acne comprising: obtaining a skin sample from a subject; isolating bacterial DNA from said sample; using one or more primer sets to amplify said DNA; and analyzing said amplified DNA for the presence of a sequence having at least 95% homology with at least one of SEQ ID NOs 55-81, wherein said subject is diagnosed as having IB-3-based acne if the presence of a sequence having at least 95% homology with at least one of SEQ ID NOs 55-81 exists.

[0088] In yet another embodiment, the invention provides a method for the personalized treatment of acne comprising determining the strain(s) of acne affecting a subject and administering to said subject an effective amount of at least one phage specifically directed to said strain(s). For example, the subject may be treated with phage directed against an RT4 strain, an RT5 strain, an RT7 strain, and RT8 strain, an RT9 strain, and/or an RT10 strain.

[0089] In yet another embodiment, the invention provides a method for treating an individual suffering from acne of microbiome type I comprising administering to said individual an effective amount of a phage, wherein said phage is selected from the group consisting of: PHL113M01 (SEQ ID NO:36), PHL 11 M01 (SEQ ID NO:33), PHL082M00 (SEQ ID NO:47), PHL060L00 (SEQ ID NO:34), PHL067M10 (SEQ ID NO:42), PHL071N05 (SEQ ID NO:41), PHL112N00 (SEQ ID NO:35), PHL037M02 (SEQ ID NO:40), PHL085N00 (SEQ ID NO:46), PHL115M02 (SEQ ID NO:43), PHL085M01 (SEQ ID NO:44), PHL114L00 (SEQ ID NO:37), PHL010M04 (SEQ ID NO:38), and PHL066M04 (SEQ ID NO:39).

[0090] In yet another embodiment, the invention provides a method for treating an individual suffering from acne of microbiome type I with IB-3 strain comprising administering to said individual an effective amount of a phage, wherein said phage is selected from the group consisting of: PHL082M00 (SEQ ID NO:47) and PHL071N05 (SEQ ID NO:41).

[0091] In yet another embodiment, the invention provides a method for treating an individual suffering from acne of microbiome type II comprising administering to said individual an effective amount of a phage, wherein said phage is selected from the group consisting of: PHL113M01 (SEQ ID NO:36), PHL060L00 (SEQ ID NO:34), PHL112N00 (SEQ ID NO:35), and PHL085M01 (SEQ ID NO:44).

[0092] In yet another embodiment, the invention provides a method for treating an individual suffering from acne of microbiome type 11 or dominant RT8 comprising administering to said individual an effective amount of a phage, wherein said phage is selected from the group consisting of: PHL113M01 (SEQ ID NO:36), PHL 11 M01 (SEQ ID NO:33), PHL082M00 (SEQ ID NO:47), PHL060L00 (SEQ ID NO:34), PHL067M10 (SEQ ID NO:42), PHL071N05 (SEQ ID NO:41), PHL112N00 (SEQ ID NO:35), PHL037M02 (SEQ ID NO:45), PHL085N00 (SEQ ID NO:46), PHL115M02 (SEQ ID NO:43), PHL085M01 (SEQ ID NO:44), PHL114L00 (SEQ ID NO:37), PHL073M02 (SEQ ID NO:40), PHL010M04 (SEQ ID NO:38), and PHL066M04 (SEQ ID NO:39).

[0093] In yet another embodiment, the invention provides a method for treating an individual suffering from acne of microbiome type IV comprising administering to said individual an effective amount of a phage, wherein said phage is selected from the group consisting of: PHL113M01 (SEQ ID NO:36), PHL 11 M01 (SEQ ID NO:33), PHL082M00 (SEQ ID NO:47), PHL060L00 (SEQ ID NO:34), PHL067M10(SEQ ID NO:42), PHL071N05 (SEQ ID NO:41), PHL112N00 (SEQ ID NO:35), PHL037M02 (SEQ ID NO:45), PHL085N00 (SEQ ID NO:46), PHL115M02 (SEQ ID NO:43), PHL085M01 (SEQ ID NO:44), PHL114L00 (SEQ ID NO:37), PHL073M02 (SEQ ID NO:40), PHL010M04 (SEQ ID NO:38), and PHL066M04 (SEQ ID NO:39).

[0094] In yet another embodiment, the invention provides a method for treating an individual suffering from acne of microbiome type V comprising administering to said individual an effective amount of a phage, wherein said phage is selected from the group consisting of: PHL113M01 (SEQ ID NO:36), PHL 11 M01 (SEQ ID NO:33), PHL082M00 (SEQ ID NO:47), PHL060L00 (SEQ ID NO:34), PHL067M10(SEQ ID NO:42), PHL071N05 (SEQ ID NO:41), PHL112N00 (SEQ ID NO:35), PHL037M02 (SEQ ID NO:45), PHL085N00 (SEQ ID NO:46), PHL115M02 (SEQ ID NO:43), PHL085M01 (SEQ ID NO:44), PHL114L00 (SEQ ID NO:37), PHL073M02 (SEQ ID NO:40), PHL010M04 (SEQ ID NO:38), and PHL066M04 (SEQ ID NO:39).

[0095] In yet another embodiment, the invention provides a method for treating a Propionibacterium humerusii-associated malady comprising administering to said individual an effective amount of a phage, wherein said phage is selected from the group consisting of: PHL113M01 (SEQ ID NO:36), PHL 11 M01 (SEQ ID NO:33), PHL082M00 (SEQ ID NO:47), PHL067M10 (SEQ ID NO:42), PHL071N05 (SEQ ID NO:41), PHL085N00 (SEQ ID NO:46), PHL085M01 (SEQ ID NO:44), PHL114L00 (SEQ ID NO:37), PHL073M02 (SEQ ID NO:40), and PHL010M04 (SEQ ID NO:38).

[0096] In yet another embodiment, the invention provides a kit for diagnosing acne in a subject, wherein said kit comprises: at least one primer selected from the group comprising SEQ ID NOs 11-18, 20, 21, 23, 24, 26, and 27; and instructions for use.

[0097] In yet another embodiment, the invention provides a kit for diagnosing acne in a subject, wherein said kit comprises: at least one primer selected from the group comprising SEQ ID NOs 11-18, 20, 21, 23, 24, 26, and 27; at least one probe selected from the group comprising SEQ ID NOs 19, 22, 25, and 28; and instructions for use.

[0098] Nucleotide, polynucleotide, or nucleic acid sequence will be understood to mean both a double-stranded or single-stranded DNA in the monomeric and dimeric forms and the transcription products of said DNAs.

[0099] Homologous nucleotide sequence means a nucleotide sequence having at least a percentage identity with the bases of a nucleotide sequence according to the invention of at least 80%, preferably 90%, 95%, 96%, 97%, 98%, 99% or 100%. This percentage is statistical and the differences between two nucleotide sequences may be determined at random or over the whole of their length.

[0100] The invention comprises the polypeptides encoded by a nucleotide sequence according to the invention, including a polypeptide whose sequence is represented by a fragment. Herein, the terms polypeptide, peptide, and protein are interchangeable.

[0101] Polypeptides allow monoclonal or polyclonal antibodies to be prepared which are characterized in that they specifically recognize the polypeptides. The invention relates to mono- or polyclonal antibodies or their fragments, or chimeric antibodies, characterized in that they are capable of specifically recognizing a polypeptide.

[0102] Polypeptides used in vaccine compositions according to the invention may be selected by techniques known to the person skilled in the art such as, for example, depending on the capacity of said polypeptides to stimulate the T cells, which is translated, for example, by their proliferation or the secretion of interleukins, and which leads to the production of antibodies directed against said polypeptides. Vaccine combinations will preferably be combined with a pharmaceutically acceptable vehicle and, if need be, with one or more adjuvants of the appropriate immunity. Pharmaceutically acceptable vehicle means a compound or a combination of compounds that does not provoke secondary reactions and which allows, for example, the facilitation of the administration of the active compound, an increase in its duration of life and/or its efficacy in the body, an increase in its solubility in solution, or an improvement in its conservation.

[0103] Applicants identified ten major lineages of Propionibacterium acnes and five major microbiome types in the human pilosebaceous unit (“pore”), where acne arises. Some of the P. acnes lineages and microbiome types are highly enriched in acne patients and some are associated with healthy skin. The unique genomic components of each major lineage, including a linear plasmid that is unique to acne-associated lineages, have been identified. This information is used to, for example: (1) for a method/kit to isolate bacterial DNA/RNA from pilosebaceous units for downstream analysis: (2) rapidly and accurately detect/diagnose/identify the microbiome type of the affected subject and the major strains of P. acnes present in the pores of the affected subject; (3) develop vaccines against acne-associated P. acnes strains; (4) develop probiotics using the strains associated with healthy skin in topical creams, solutions, and the like; (5) develop drugs, including small molecules, biologics, and antibodies targeting the genetic elements and biological pathways unique to the P. acnes strains associated with acne, and (6) to develop bacteriophage-based strain specific therapy to treat acne.

[0104] Once the microbiome type of a subject affected with acne is diagnosed, several approaches described below may be used formulate an effective treatment plan. For example, if the subjects have microbiome types IV or V, or are dominated by P. acnes RT10 strains, it is less likely that antibiotic treatment will succeed because these strains are antibiotic resistant. However, other method treatments remain available, such as retinoids.

[0105] According to one embodiment of the invention, in a case where the subject has the virulent ribotypes, including RT4, RT5, and RT8, target specific drugs including small molecules, biologics, and antibodies may be more effective treatments. In a preferred embodiment of the invention, such a patient may be treated with antibodies targeting the genetic elements and biological pathways that are unique to P. acnes strains associated with acne.

[0106] According to another embodiment of the invention, in a case where the dominant P. acnes strains affecting the subject do not harbor a set of CRISPR/Cas, the additional treatment of phage therapy may be more effective.

[0107] The present invention also pertains to alternative treatment strategies for acne treatment to balance the relative abundance of P. acnes strains by promoting the growth of health-associated strains.

[0108] The present invention pertains to methods and kits to isolate bacterial DNA/RNA from pores of affected subjects for downstream genetic analysis. More specifically, the present invention pertains to protocols for the extraction of bacterial genomic DNA and RNA from microcomedone spamples. In one particular embodiment of the invention, Biore® Deep Cleansing Pore Strips may be used to sampl the bacteria from a subject. Genomic DNA may be extracted according to methods known in the art. For example, the QIAamp DNA Micro Kit (Qiagen) is a commercially available kit that may be used to extract genomic DNA from the supernatant obtained by lysing cells/microcomedones using a beadbeater.

[0109] The present invention also pertains to fast and accurate methods and kits for the detection and/or diagnosis of microbiome types in affected subjects. The microbiome typing/microbiome-specific treatment is based on ten major lineages of P. acnes strains and five major microbiome types in the human pilosebaceous unit found through a comprehensive metagenomic analysis using full length 16S rDNA sequencing.

[0110] Indeed, samples were PCR-amplified using 16S rDNA specific primers with the following sequences: 27f-MP 5′AGRGTTTGATCMTGGCTCAG-3′ (SEQ ID NO: 435) and 1492r-MP 5′-TACGGYTACCTTGTTAYGACTT-3′ (SEQ ID NO: 436). Optionally, following gel purification, the 1.4 Kb product is excised and further purified using, for example, a Quigen QlAquick Gel Extraction Kit. The purified product is cloned into OneShot E coli. cells using, for example, a TOPO TA cloning kit from Invitrogen. Sequencing is done with a universal forward, universal reverse, and for a subset, internal 16S rDNA primer 907R with sequences of TGTAAAACGACGGCCAGT (forward) (SEQ ID NO: 437), CAGGAAACAGCTATGACC (reverse) (SEQ ID NO: 438), and CCGTCAATTCCTTTRAGTTT (907R) (SEQ ID NO: 439). Sequence reactions were loaded on ABI 3730 machines from ABI on 50 cm arrays with a long read run module.

[0111] Each lineage of P. acnes has unique genomic loci, regions, and sequences. Accordingly, specific primers may be generated to target the lineage-specific genomic regions to detect the presence or absence of each lineage, as well as the relative amount of each lineage using methods known in the art, such as PCR/qPCR. This occurs within several hours of obtaining the samples. Prior to Applicants' invention, this required much more time—often weeks using culture-based methods. According to one embodiment of the invention, affected subjects are grouped for microbiome specific treatments based on these diagnoses.

[0112] According to the methods of the present invention, unique genomic loci 1, 2, and 3 for strains of ribotypes 4 and 5 have been shown to be associated with acne. Using specific primers targeting for loci 1, 2 and 3, lineages that contain these loci can be distinguished from lineages that lack these loci. In addition, using PCR/qPCR techniques, the relative abundance of each strain may also be detected. Analysis of a mock community has shown that isolates with loci 1, 2 and 3 in an abundance of 7.5% or higher in the microbiome may be detected using these techniques. Given the sensitivity of qPCR, lower abundance levels to a few DNA copies may also be detectable.

[0113] It has previously been reported that heat inactivation of P. acnes may be an effective means of developing P. acnes-based vaccines. See T. Nakatsuji et aL., 128(10) J. Invest. Dermatol. 2451-2457 (Oct. 2008). In one aspect of the present invention, vaccines are developed against acne-associated P. acnes strains. In another aspect of the present invention, personalized vaccines are developed against acne-associated P. acnes strains. In yet another aspect of the present invention, vaccines are developed against acne-associated P. acnes strains using inactive P. acnes strains or heat attenuated proteins. Strains suitable for use as vaccines may be identified based on 16S rDNA sequencing, identifying lineages of P. acnes strains associated with acne, and the unique genomic loci, regions, and sequences for each lineage to specifically target strains of P. acnes associated with acne and not those strains associated with healthy skin.

[0114] According to methods described above, it has been discovered that P. acnes strains with ribotypes 4, 5, 7, 8, 9, and 10 are highly associated with acne. In one embodiment of the present invention, a vaccine is raised against these individual strains separately or in combination. Similarly, the genes in loci 1, 2, and 3 may be targets for vaccination because these loci are unique to ribotypes 4 and 5, and are not found in commensal strains. Locus 4, which is unique to ribotype 8 may also serve as a potential target for vaccine therapy. The list of genes encoded in loci 1, 2, 3, and 4 are shown in Table 3.

[0115] The present invention also pertains to probiotics developed using P. acnes strains associated with healthy skin in medicines, compositions, topical creams, solutions, or other cosmetic products. Probiotics have, in the past, been used in topical creams. PROBIOTIC LAB™ announced that mixture of 14 specific strains of bacteria was used for treatment of cystic acne (found on the World Wide Web at probiotic-lab.com/aboutusprobioticlab.html). Probiotic skin care/DERMBIOTIX has a product line—Probiotic Collagen Complex (PC3), which is claimed to have targeted anti-aging benefits to the skin. However, this is not targeted to acne treatment. Probiotic Collagen Complex (PC3) infuses the skin with the positive bacteria required to effectively combat and eradicate excess negative bacteria caused by external factors (found on the World Wide Web at dermbiotix.com). However, prior to the present invention there existed no skin probiotic product reported for acne treatment using P. acnes strains associated with healthy/normal skin. In one aspect of the present invention, skin probiotics are developed for acne treatment using P. acnes strains associated with healthy/normal skin. In another aspect of the present invention, skin probiotics are developed for acne treatment using P. acnes strains associated with healthy/normal skin based on the 16S rDNA sequencing.

[0116] In one particular embodiment of the present invention the RT6 lineage of P. acnes and associated with healthy skin is used as a topical product. In yet another embodiment of the present invention the RT6 lineage of P. acnes is used by inoculating this isolate on the human skin in order to compete off the acne associated strains. In another embodiment, molecules, including proteins, nucleic acids, lipids, and other metabolites, supernatant of cultures, and/or cell lysate of these strains may be used at probiotics.

[0117] The present invention also pertains to drugs targeting acne associated P. acnes strains. This is based upon multiple genome comparison of P. acnes in combination with 16S rDNA metagenomic analysis, thereby identifying certain strains and genomic variations associated with acne. Drugs intended to target acne associated P. acnes include custom designed small molecules, antisense molecules, siRNA molecules, biologics, and antibodies targeting genomic elements specific for strains which are associated with acne. Antisense RNA, antibodies, or small molecules can be designed targeting loci 1, 2, 3, and 4. Strains with ribotypes 4, 5, and 10 are antibiotic resistant. Thus, there is a need in the art for new antibiotics targeting ribotypes 4, 5, and 10.

[0118] The present invention also pertains to personalized phage therapy for subjects affected with acne comprising phages specific to certain strains of P. acnes. Certain companies provide phage therapy for acne patients, such as the Phage Therapy Center™ found on the World Wide Web at phagetherapycenter.com/pii/PatientServlet? command=static_home). However, such companies provide no information on the bacterial host specificity of the phages used for the therapy. P. acnes is commensal and some strains play a protective role for hosts. In one embodiment of the invention, personalized phage therapies include a selections of phages targeting P. acnes strains that have been shown to lack a protective role for subjects affected by acne. In yet another embodiment of the invention, personalized phage therapy may be developed according to their bacterial host specificity of the phages to target specific strains of P. acnes, leaving health associated strains intact. In addition, it is possible to identify the structure of P. acnes lineages of the affected subjects and use that structure to predict resistance to phage infection or plasmid conjugation to better target specific phage therapies. For example, P. acnes lineages RT2 and RT6 have a CRISPR/Cas structure, indicating they have resistance against certain phage infection and plasmid conjugation. Table 13 shows the sensitivity and resistance of specific P. acnes strains to specific P. acnes phages.

[0119] The invention is described in more detail in the following illustrative examples.

[0120] Although the examples may represent only selected embodiments of the invention, the following examples are illustrative only and in no way limiting.

### EXAMPLES

### Example 1—Analysis of Propionibacterium Acnes Strain Populations in the Human Skin Microbiome Associated with Acne

[0121] The human skin microbiome plays important roles in skin health and disease. However, prior to Applicants' invention the bacterial population structure and diversity at the strain level was poorly understood. The inventors compared the skin microbiome at the strain level and genome level of Propionibacterium acnes, a dominant skin commensal, between 49 acne patients and 52 healthy individuals by sampling the pilosebaceous units on their noses. Metagenomic analysis demonstrated that while the relative abundances of P. acnes were similar, the strain population structures were significantly different in the two cohorts. Certain strains were highly associated with acne and other strains were enriched in healthy skin. By sequencing 66 novel P. acnes strains and comparing 71 P. acnes genomes, the inventors identified potential genetic determinants of various P. acnes strains in association with acne or health. The analysis indicates that acquired DNA sequences and bacterial immune elements may play roles in determining virulence properties of P. acnes strains and some may be targets for therapeutic interventions.

[0122] This study demonstrates a previously-unreported paradigm of commensal strain populations that explains the pathogenesis of human diseases. It underscores the importance of strain level analysis of the human microbiome to define the role of commensals in health and disease.

### BACKGROUND

[0123] The diversity of the human microbiota at the strain level and its association with human health and disease are largely unknown. However, many studies had shown that microbe-related human diseases are often caused by certain strains of a species, rather than the entire species being pathogenic. Examples include methicillin-resistant Staphylococcus aureus (MRSA) (Chambers and Deleo, 2009; Chen et aL., 2010; Hansra and Shinkai) and Escherichia coli 0157 (Chase-Topping et aL., 2008; Tarr et aL., 2005). Acne vulgaris (commonly called acne) is one of the most common skin diseases with a prevalence of up to 85% of teenagers and 11% of adults (White, 1998). Although the etiology and pathogenesis of acne are still unclear, microbial involvement is considered one of the main mechanisms contributing to the development of acne (Bojar and Holland, 2004; Cunliffe, 2002). In particular, Propionibacterium acnes has been hypothesized to be an important pathogenic factor (Webster, 1995). Antibiotic therapy targeting P. acnes has been a mainstay treatment for more than 30 years (Leyden, 2001). However, despite decades of study, it remained unclear as to how P. acnes contributes to acne pathogenesis while being a major commensal of the normal skin flora (Bek-Thomsen et aL., 2008; Cogen et aL., 2008; Costello et aL., 2009; Dominguez-Bello et aL., 2010; Fierer et aL., 2008; Gao et aL., 2007; Grice et aL., 2009). Whether P. acnes protects the human skin as a commensal bacterium or functions as a pathogenic factor in acne, or both, remained to be elucidated.

[0124] Thus, Applicants compared the skin microbiome at the strain level and genome level in 49 acne patients and 52 normal individuals using a combination of metagenomics and genome sequencing. First, for each sample, 16S ribosomal DNA (rDNA) was amplified, approximately 400 clones were sequenced, and an average of 311 nearly full length 16S rDNA sequences were analyzed. The population structure of P. acnes strains was determined in each sample. Second, each P. acnes strain was assigned an “acne index” by calculating its prevalence in acne patients based on the 16S rDNA metagenomic data. The P. acnes strains associated with the acne patient group were identified, as well as the strains enriched in the individuals with normal skin. This metagenomic approach is fundamentally different than prior approaches in determining disease associations; it is more powerful and less biased than traditional methods by bypassing the biases and selection in strain isolation and culturing. Lastly, 66 novel P. acnes strains were sequenced and 71 P. acnes genomes compared covering the major lineages of P. acnes found in the skin microbiota. By combining a metagenomic study of the skin microbiome and genome sequencing of this major skin commensal, Applicants' study provided insight into bacterial genetic determinants in acne pathogenesis and emphasizes the importance of strain level analysis of the human microbiome to understand the role of commensals in health and disease.

### Results

[0125] P. acnes Dominates The Pilosebaceous Unit

[0126] Applicants characterized the microbiome in pilosebaceous units (“pores”) on the nose collected from 49 acne patients and 52 individuals with normal skin. Nearly full length 16S rDNA sequences were obtained using Sanger method, which permitted analyzing the P. acnes at the strain level. After quality filtering, the final dataset contained 31,46116S rDNA sequences ranging from position 29 to position 1483. 27,358 of the sequences matched to P. acnes with greater than 99% identity. The data demonstrated that P. acnes dominates the microbiota of pilosebaceous units, accounting for 87% of the clones (FIG. 1). Other commonly found species in pilosebaceous units included Staphylococcus epidermidis, Propionibacterium humerusii, and Propionibacterium granulosum, each representing 1%-2.3% of the total clones. A total of 536 species level operational taxonomic units (SLOTUs) belonging to 42 genera and six phyla were identified in the samples (Table 1).

TABLE 1
Six phyla and 42 genera found in pilosebaceous units.

| Phylum | Genus | Phylum | Genus |
|---|---|---|---|
| Actino- | Actinobaculum | Bacteroidetes | Chryseobacterium |
| bacteria | Corynebacterium | | Niastella |
| | Gordonia | | Parabacteroides |
| | Kocuria | | Prevotella |
| | Microbacterium | Proteo- | Caulobacteraceae |
| | Propionibacterium | bacteria | Citrobacter |
| Firmicutes | Anaerococcus | | Cupriavidus |
| | Anoxybacillus | | Delftia |
| | Bacillus | | Diaphorobacter |
| | Enterococcus | | Haemophilus |
| | Erysipelotlarix | | Klebsiella |
| | Finegoldia | | Massilia |
| | Gemella | | Neisseriaceae |
| | Lactobacillus | | Novosphingobium |
| | Paenibacillus | | Pelomonas |
| | Peptoniphilus | | Phyllobacterium |
| | Pepto- | | Ralstonia |
| | streptococcaceae | | Shigella |
| | Ruminococcaceae | | Sphingomonas |
| | Ruminococcaceae | | Steno- |
| | Staphylococcus | | trophomonas |
| | Streptococcus | Cyano- | Streptophyta |
| Fusobacteria | Fusobacterium | bacteria | |

[0127] To bypass the potential biases due to PCR amplification and due to uneven numbers of 16S rDNA gene copies among different species, a metagenomic shotgun sequencing of the total DNA pooled from the pilosebaceous unit samples of 22 additional normal individuals was performed. Microbial species were identified by mapping metagenomic sequences to reference genomes. The results confirmed that P. acnes was the most abundant species (89%) (FIG. 1). This is consistent with the results obtained from 16S rDNA sequencing (87%).

[0128] For the 16S rRNA sequence, positions 27 to 1492 were PCR amplified. Yet, when analyzing the sequence only positions 29-1483 are studied. The numbering of positions is based on the E. coli system of nomenclature. Thus, the sequences between 29-1483 are important for determining the ribotype (there are many ribotypes, not just 10). As for the top 10 ribotypes, sequences between positions 529-1336 of the 16A rRNA are sufficient.

Different P. acnes Strain Populations in Acne

[0129] There was no statistically significant difference in the relative abundance of P. acnes when comparing acne patients and normal individuals. It was then examined whether there were differences at the strain level of P. acnes by extensively analyzing the P. acnes 16S rDNA sequences. Herein, each unique 16S rDNA sequence as a 16S rDNA allele type is called a ribotype (RT). The most abundant P. acnes sequence was defined as ribotype 1 (RT1) (SEQ ID NO:1). All other defined ribotypes have 99% or greater sequence identity to RT1. Similar to the distributions seen at higher taxonomical levels (Bik et aL.), at the strain level a few ribotypes were highly abundant in the samples with a significant number of rare ribotypes (FIG. 2). After careful examination of the sequence chromatograms and manual correction of the sequences, a total of 11,009 ribotypes were assigned to the P. acnes 16S rDNA sequences. Most of the minor ribotypes were singletons. On average, each individual harbored 3±2 P. acnes ribotypes with three or more clones. Based on the genome sequences described below, all the sequenced P. acnes strains have three identical copies of 16S rDNA genes (see note below). This allowed the P. acnes strain populations in individuals based on the 16S rDNA sequences to be compared. The top ten major ribotypes with more than 60 clones and found in multiple subjects are shown in Table 2:

TABLE 2
Top ten most abundant ribotypes found in pilosebaceous units

| | | | | Percentage | Percentage | |
|---|---|---|---|---|---|---|
| | | | | of clones | of clones | |
| | Nucleotide changes | Number of | Number of | from acne | from normal | |
| Ribotype | from RT1 | subjects | clones | patients^{a} | individuals^{b} | p-value^{c} |
| RT1 | — | 90 | 5536 | 48% | 52% | 0.84 |
| RT2 | T854C | 48 | 1213 | 51% | 49% | 0.36 |
| RT3 | T1007C | 60 | 2104 | 40% | 60% | 0.092 |
| RT4 | G1058C, A1201C | 23 | 275 | 84% | 16% | 0.049 |
| RT5 | G1058C | 15 | 205 | 99% | 1% | 0.00050 |
| RT6 | T854C, C1336T | 11 | 262 | 1% | 99% | 0.025 |
| RT7 | G529A | 10 | 188 | 99% | 1% | 0.12 |
| RT8 | G1004A, T1007C | 5 | 239 | 100% | 0% | 0.024 |
| RT9 | G1268A | 4 | 68 | 99% | 1% | 0.29 |
| RT10 | T554C, G1058C | 5 | 61 | 100% | 0% | 0.024 |

^{a}The percentage was calculated after the number of clones of each ribotype was normalized by the total number of clones in acne patients (acne index).
^{b}The percentage was calculated after the number of clones of each ribotype was normalized by the total number of clones in normal individuals.
^{c}Mann-Whitney-Wilcoxon rank sum test.

[0130] Analysis of the top ten ribotypes showed both disease-specific and health-specific associations. The three most abundant ribotypes (RT1, RT2 and RT3) were fairly evenly distributed among acne and normal individuals. However, the next seven major ribotypes were significantly skewed in their distributions (Table 2). Ribotypes 4, 5, 7, 8, 9, and 10 were found predominantly in acne patients, with four of these six statistically significantly enriched in acne (p<0.05, Wilcoxon test). Ribotypes 4, 5, and 10 contain a nucleotide substitution G1058C in the 16S rDNA sequences, which has previously been shown to confer increased resistance to tetracycline (Ross et aL., 1998; Ross et aL., 2001). However, only a small percentage of the subjects in our study harboring these ribotypes had been treated with antibiotics (FIG. 3), therefore enrichment of these three ribotypes in the acne group was not correlated with antibiotic treatment. This is consistent with previous studies, which showed that previous use of antibiotics was not always associated with the presence of antibiotic resistant strains and that some patients who were not previously treated with antibiotics harbored strains already resistant to antibiotics (Coates et aL., 2002; Dreno et aL., 2001). One ribotype, RT6, although detected in only 11 subjects, was strongly associated with normal skin (p=0.025, Wilcoxon test) (Table 2). Its relative abundance in the normal group was similar to that found in the healthy cohort data from the Human Microbiome Project (HMP) (see FIG. 3). The percentage of positive subjects (11/52) was similar as well. Three of the 14 HMP subjects had RT6 found in the anterior nares, and one additional subject had RT6 in the left retroauricular crease.

[0131] Based on the distributions of the top ten ribotypes, statistical analysis using several different tests showed significant differences in P. acnes population structure between acne and normal skin (FIG. 4). This is consistent with a principal coordinate analysis, where acne samples and normal skin samples were separated by mostly principal coordinates 1 and 2 (FIG. 4), explaining 44% and 20% of the variation, respectively.

[0132] To examine whether different individuals share similar P. acnes population structures, the samples were clustered based on the relative abundances of the top ten ribotypes. Five main microbiome types were observed at the P. acnes strain level (microbiome types I to V). Types IV and V, which are dominated by P. acnes RT4 and RT5, respectively, were mainly found in acne patients (FIGS. 5 and 6). The same five main microbiome types were observed in the HMP data and the data from Grice et al. (Grice et al., 2009) (see FIG. 7).

Genome Sequence Analysis of 71 P. acnes Strains

[0133] All of the top ten most abundant ribotypes differ from RT1 by only one or two nucleotide changes in the 16S rDNA sequence (Table 2). To determine whether such small changes in the 16S rDNA sequence reflect the lineages and evolutionary history at the genome level, 66 P. acnes isolates representing major ribotypes 1, 2, 3, 4, 5, 6, and 8 as well as two minor ribotypes, 16 and 532, were selected for genome sequencing. The genomes of these 66 isolates were fully sequenced and assembled to high quality drafts or complete genomes with 50× coverage or more. Five other P. acnes genomes, KPA171202 (Bruggemann et al., 2004), J165, J139, SK137, and SK187, were publicly-available and were included in the analysis. A phylogenetic tree based on 96,887 unique single nucleotide polymorphism (SNP) positions in the core genome obtained from these 71 P. acnes genomes was constructed. Most of the genomes with the same ribotypes clustered together. The tree indicates that the 16S rDNA ribotypes do represent the relationship of the lineages to a large extent and that 16S rDNA sequence is a useful molecular marker to distinguish major P. acnes lineages (FIGS. 8 and 9).

Genetic Elements Detected in P. acnes

[0134] A comparative genome analysis among all 71 genomes grouped by ribotypes was performed. The analysis revealed genetic elements by which acne-associated strains could contribute to acne pathogenesis and the elements by which health-associated strains could contribute to maintaining skin health. Specifically, now known are the unique genome regions of RT4 and RT5, which had a strong association with acne, and RT6, which was found enriched in normal skin. Three distinct regions, loci 1, 2, and 3, were found almost exclusively in strains that belong to clade IA-2 in the phylogenetic tree. Clade IA-2 consists of mainly RT4 and RT5 (FIGS. 8 and 10). Loci 1 and 2 are located on the chromosome. Locus 1 contains prophage-related genes and appears to be a genomic island. Locus 2 has plasmid integration sites and may be derived from a plasmid sequence. Locus 3 appears to be on a large mobile genetic element, likely a plasmid. The plasmid is approximately 55 Kb long and has inverted terminal repeats according to the finished genome HL096PA1. The sequence data suggest that the plasmid is linear and possibly originated from a phage (Hinnebusch and Tilly (1993)). All but one of the fifteen genomes of RT4 and RT5 have at least 60% of the genes of the plasmid represented, and all of them have regions homologous to the inverted terminal repeats in the plasmid, suggesting that they harbor the same or a similar linear plasmid (FIG. 8). The copy number of the plasmid in the genomes ranges from 1 to 3 based on genome sequencing coverage, which was confirmed by quantitative PCR (FIGS. 11 and 12).

[0135] The fact that acne-enriched RT4 and RT5 strains carry a linear plasmid and two unique loci of genomic islands indicates that these plasmid and chromosomal regions play a role in acne pathogenesis. In fact, the linear plasmid encodes a tight adhesion (Tad) locus, which has been suggested to play a role in virulence in other organisms (Kachlany et aL., 2000; Schreiner et aL., 2003). The complete Tad locus is found in all but one of the fifteen genomes of RT4 and RT5, and is only occasionally found in other ribotypes. Additionally, in locus 2, a Sag gene cluster is encoded, which has been shown to contribute to hemolytic activity in pathogens (Fuller et aL., 2002; Humar et aL., 2002; Nizet et aL., 2000). FIG. 6 summarizes the genes that are mostly unique to RT4 and RT5, several of which play essential roles in virulence in other organisms. Some of these genes encoded in RT4 and RT5 increase virulence, promote stronger adherence to the human host, or induce a pathogenic host immune response.

[0136] In the genome comparison analysis, it was found that all the genomes of RT2 and RT6 encode Clustered Regularly Interspaced Short Palindromic Repeats (CRISPR). Among the sequenced genomes, RT2 and RT6 are the only ribotypes encoding CRISPR. CRISPR have been shown to confer protective “immunity” against viruses, phages, and plasmids (Horvath and Barrangou, 2010; Makarova et aL., 2011). The CRISPR locus encoded in P. acnes consists of a series of cas genes cas3, cse1, cse2, cse4, cas5e, cse3, cas1, and cas2, which are homologous to the CRISPR locus reported in E. coli (Figure S10) and the CRISPR4 locus in Streptococcus thermophilus (Horvath and Barrangou, 2010).

[0137] CRISPR arrays are composed of a cluster of identical repetitive sequences separated by spacer sequences of similar length but with different nucleotide sequences. It has been found that spacer sequences are identical or with one or two mismatches to phage or plasmid DNA sequences. A total of 39 spacer sequences were found in eight P. acnes strains, 25 of which were unique as shown in Table 3.

TABLE 3
CRISPR spacer sequences found in the genomes of RT2 and RT6

| Ribo- | | Spacer | | | Match |
|---|---|---|---|---|---|
| type | Strain | number | Spacer sequence | BLAST result | found |
| RT2 | HL001PA1 | 1 | CATGGCCTGCACACCAGGCGCTTTTAGCACCT | No hits | |
| | | 2 | CATGGCCTGCACACCAGGCGCTTTTAGCACCT | No hits | |
| | | 3 | CATGGCCTGCACACCAGGCGCTTTTAGCACCT | No hits | |
| | | 4 | GGCGTATGACGAGTTGTGGTCGGCGTTTCCTC | P. acnes phage PA6 gp15 (minor tail protein) | |
| | | 5 | CGGTGTTAACGGCTTGCCTGGCTTGGATGGAG | No hits | |
| RT2 | HL060PA1 | 1 | CGCCTACCGTCAGCTGACTCACGCCTCCGCGTT | No hits | |
| | | 2 | TCACACCAGTCATCAGCGTCATAGTCCTCTCGG | No hits | |
| RT2 | HL082PA2 | 1 | GGCTCAGCCCTGCCCGATGCCTACGCCAAATGG | C. leptum DSM 753 CLOLEP_00129 (cell wall-associated | Locus 3 |
| | | | | hydrolases (invasion-associated proteins)) | |
| | | 2 | TCACACCAGTCATCAGCGTCATAGTCCTCTCGG | No hits | |
| RT2 | HL103PA1 | 1 | CACCGGGCCCATCCCGGTCGGCCTCCTGAAAGG | C. leptum DSM 753 CLOLEP_00135 | Locus 3 |
| RT2 | HL106PA1 | 1 | GATCGAGTTGGCTGAGTCGAAGGTGTTGCGGTT | P. acnes phage PA6 gp16 (conserved protein) | |
| | | | | P. acnes phage PAD20 gp16 | |
| | | 2 | CTGCTCATCGCTCAGCTCCTGCGCCTCATCACA | No hits | |
| | | 3 | CTGCGCCAACAGCCGCATCTGATCCGAATACGG | P. acnes phage PA6 gp3 (phage portal protein) | |
| | | 4 | CGCAGCAATCTCAGAAGGCCACAACAAGTTCGT | P. acnes phage PA6 gp7 (conserved protein) | |
| | | | | P. acnes phage PAD20 gp7 | |
| | | | | P. acnes phage PA550 gp7 | |
| | | 5 | CAAATCACCCAAGCCCAACACGCCGCCACCACC | No hits | |
| | | 6 | TGTCACCGATTCAATGTATCTATGAGTGGTGTA | No hits | |
| | | 7 | TTGGGTGGGTGAGGTCGGGTCGTCAGTCATGAG | No hits | |
| | | 8 | GTCGATGTCGAGATTGGCCTGGGGGTCCATGTC | Clostridium leptum DSM 753 CLOLEP_00142 | Locus 3 |
| | | 9 | ACGTCGTGAACGTACCCCTTGACGGAGACGGCA | No hits | |
| RT2 | J139 | 1 | CGAGGGCTACCACGTGGTCGATTTGGACTGTCG | C. leptum DSM 753 CLOLEP_00167 | Locus 2 |
| | | | | P. acnes 5K137 HMPREF0675_3193 (domain of unknown | |
| | | | | function) | |
| | | 2 | CAGGCGCTCCACTCCCTCGCCCTGGCCACCAAC | No hits | |
| RT6 | HL110PA3 | 1 | CTATGTGGACAGTGTTGGTTACTGTGGGGGGAA | P. acnes phage PA6 intergenic region between gp45 and gp46 | |
| | HL110PA4 | 2 | GCACTGCACCGATATCGTCGTGGCTGTCACTTG | No hits | |
| | | 3 | CCCAGACAACCTCGACAACCTGTTCAGGGGATG | P. acnes phage PAS50 gp25 | |
| | | 4 | CATGGCTAGCCCGGATTTTTGGCTGCCTGAGCG | P. acnes phage PA6 gp34 (mutidrug resistance protein-like | |
| | | | | transporters) | |
| | | | | P. acnes phage PAD20 gp34 (DNA helicase) | |
| | | 5 | CGGCCTGCGGCAGATTTTTGTTGCGTTGAATCC | P. acnes phage PA6 gp14 (tape measure protein) | |
| | | | | P. acnes phage PAD20 gp14 (tape measure protein) | |
| | | | | P. acnes phage PAS50 gp14 (tape measure protein) | |
| | | 6 | CGGGCAGAGGATGTGTTGCTCGTTCCTGGATGG | P. acnes phage PA6 gp32 (CHC2 zinc finger) | |
| | | | | P. acnes phage PAD20 gp32 (DNA primase) | |
| | | | | P. acnes phage PAS50 gp32 (DNA primase) | |
| | | 7 | GTTACGCTGGAACCCCCAATGAACACGCGAGAA | P. acnes phage PAD42 major head protein gene | |
| | | | | P. acnes phage PAD20 major head protein gene | |
| | | | | P. acnes phage PAD9 major head protein gene | |
| | | | | P. acnes phage PA540 major head protein gene | |
| | | | | P. acnes phage PAS12 major head protein (gene | |
| | | | | P. acnes phage PAS 10 major head protein gene | |
| | | | | P. acnes phage PAD21 major head protein gene | |
| | | | | P. acnes phage PAS2 major head protein gene | |
| | | | | P. acnes phage PA6 gp6 (Phage capsid family) | |
| | | | | P. acnes phage PA550 gp6 major head protein gene | |
| | | 8 | CGAGGGCTACCACGTGGTCGATTTGGACTGTCG | C. leptum DSM 753 CLOLEP_00167 | Locus 2 |
| | | | | P. acnes SK137 HMPREF0675_3193 (Domain of unknown | |
| | | | | function) | |
| | | 9 | CAGGCGCTCCACTCCCTCGCCCTGGCCACCAAC | No hits | |

Abbreviations: BLAST, Basic Local Alignment Search Tool; CRISPR, Clustered Regularly
Interspaced Short Palindromic Repeat; C. leptum, Clostridium leptum; P. acnes,
Propionibacterium acnes; RT, ribotype.

[0138] As expected, most of the identifiable spacers target to known P. acnes phage sequences. However, among the unique CRISPR spacer sequences, one matched locus 2 on the chromosome and three matched the plasmid region (locus 3) in P. acnes genomes of mainly RT4 and RT5. This suggests that these loci may have been acquired by RT4 and RT5 strains, while the genomes of RT2 and RT6 may be capable of protecting against the invasion of the plasmids or other foreign DNA through the CRISPR mechanism.

### DISCUSSION

[0139] The foregoing study of the human skin microbiome associated with acne provides the first portrait of the microbiota of pilosebaceous units at the bacterial strain level. Since P. acnes is the major skin commensal bacterium found in both acne and healthy skin, this strain-level analysis is important to help understand the role of P. acnes in acne pathogenesis and in skin health. A strong association between strains of RT4 and RT5 with acne and a strong association between strains of RT6 and healthy skin, each with unique genetic elements, has been shown. Other P. acnes strains, including ribotypes 7, 8, 9, and 10, or interactions among different strains, may also contribute to the development of the disease. In addition, host factors, such as hormone level, sebum production, and physical changes in the pilosebaceous unit, may also play a role in acne pathogenesis.

[0140] The foregoing metagenomic approach in revealing the association of P. acnes strains with the disease or health is more powerful than previous studies using traditional methods (Lomholt and Kilian, 2010; McDowell et aL., 2011). Because the skin microbiota of each individual and each skin site may harbor “good,” “neutral,” and “bad” strains at the same time, which may have different growth rates under in vitro culturing conditions, culturing a few isolates from a disease lesion or healthy skin site may not provide an accurate and unbiased measurement of the association of the strains with the disease or health. The sampling technique and disease associations in the foregoing study did not depend on sampling locations, on the presence of lesions in the sampling field, or on inherently biased culture techniques. While sampling lesional skin intentionally may yield interesting results, these results would not be capable of defining the disease associations that unbiased sampling can. The metagenomic approach employed in the foregoing study to identify underlying strain differences in acne may also be applied to the study of other disease/health associations with commensal or pathogenic bacteria.

### Materials and Methods

### Subjects

[0141] Subjects with acne and subjects with normal skin were recruited from various clinics in Southern California including private practice, managed care, and public hospital settings, as well as outside of dermatology clinics, to best represent the diversity of populations and history of medical care. The subject data are available at dbGaP (found on the World Wide Web at ncbi.nlm.nih.gov/projects/gap/cgi-bin/study.cgi?study_id=phs000263.v1.p1). The diagnosis of acne was made by board-certified dermatologists. The presence of acne was graded on a scale of 0 to 5 relating closely to the Global Acne Severity Scale (Dreno et aL., 2011). Grades were recorded for both the face and the nose separately where zero represents normal skin and 5 represents the most severe inflammatory cystic acne. In acne patients, the grades of the face ranged from 1 to 5 with an average of 2.1, and the grades of the nose ranged from 0 to 2 with an average of 0.3. The presence of scarring was also noted. Subjects with normal skin were determined by board-certified dermatologists and were defined as people who had no acneiform lesions on the face, chest, or back. They were also excluded if they had other skin problems that the investigators felt would affect sampling or the microbial population on the skin. Among the 101 subjects, 59 were female (31 acne patients and 28 normal subjects) and 42 were male (18 acne patients and 24 normal subjects). The average age of the acne cohort was 22.2 and the average age of the normal cohort was 29.6. There was no significant difference in ethnicity between the acne and normal populations. The subjects responded to a written questionnaire, administered by a physician or a well-trained study coordinator who went over each question with the subjects. Most of the subjects had not been treated for acne in the past or were not being treated when samples were collected (FIG. 3). Only nine out of 78 subjects, who provided treatment information, were being treated for acne when samples were taken. Among the nine subjects, two were being treated with antibiotics, five were being treated with topical retinoids, one was being treated with both antibiotics and retinoids, and one did not list the treatment. Subjects were asked for acne treatment history in the past (anytime in their life). Eighteen out of 73 subjects, who provided treatment history, had been treated for acne in the past. Among them, seven had been treated with antibiotics, eight had been treated with retinoids, two had been treated with both antibiotics and retinoids, and one did not list the treatment. All subjects provided written informed consent. All protocols and consent forms were approved by both the UCLA and Los Angeles Biomedical Research Institute IRBs. The study was conducted in adherence to the Helsinki Guidelines.

### Samples

[0142] Skin microcomedone (white head or black head) samples were taken from the nose of the subjects using Bior6 Deep Cleansing Pore Strips (Kao Brands Company, Cincinnati, OH) following the instruction of the manufacturer. Clean gloves were used for each sampling. After being removed from the nose, the strip was immediately placed into a 50 mL sterile tube and kept on ice or at 4° C. The cells were lysed within four hours in most of the cases.

Metagenomic DNA Extraction, 16S rDNA Amplification, Cloning, and Sequencing

[0143] Individual microcomedones were isolated from the adhesive nose strip using sterile forceps. Genomic DNA was extracted using QIAamp DNA Micro Kit (Qiagen, Valencia, CA). 16S rDNA was amplified and cloned according to the protocol by HMP, which is described in detail in Supplementary Information. Nearly full length sequences were obtained by Sanger method.

16S rDNA Sequence Analysis

[0144] Base calling and quality was determined with Phred (Ewing and Green, 1998; Ewing et al., 1998). Bidirectional reads were assembled and aligned to a core set of NAST-formatted sequences (rRNA16S.gold) using AmosCmpl6 Spipeline and NAST-ier (Haas et al., 2011). Suspected chimeras were identified using ChimeraSlayer and WigeoN (Haas et aL., 2011). 16S rDNA sequences were extensively manually examined. Chromatograms were visually inspected at all bases with a Phred quality score<30. Appropriate corrections were applied. QIIME (Caporaso et aL., 2010) was used to cluster the sequences into OTUs.

P. acnes Isolation and Genotyping

[0145] Colonies with the macroscopic characteristics of P. acnes were picked from each sample plate and were passed twice. The ribotype of each isolate was determined by PCR amplification and sequencing of the full length of the 16S rDNA gene by Sanger method.

### Whole Genome Shotgun Sequencing, Assembly, and Annotation

[0146] Genome HL096PA1 was sequenced using Roche/454 FLX and was assembled using a combination of PHRAP/CONSED (Gordon et aL., 1998) and GSMAPPER (Roche, Branford, CT) with extensive manual editing in CONSED. The remaining 65 genomes were sequenced using Illumina/Solexa GAIIx (Illumina, San Diego, CA). Sequence datasets were processed by quality trimming and were assembled using Velvet (Zerbino and Birney, 2008). Coding sequences were predicted using GeneMark (Borodovsky and Mclninch, 1993) and GLIMMER (Salzberg et aL., 1998). The final gene set was processed through a suite of protein categorization tools consisting of Interpro, psort-b and KEGG. A more detailed protocol can be found at hmpdacc.org/doc/sops/reference_genomes/annotation/WUGC_SOP_DACC.pdf.

### Comparative Genome Analysis

[0147] Seventy-one P. acnes genome sequences were compared using Nucmer (Kurtz et aL., 2004). Phylogenetic analysis was performed using MEGA5 (Tamura et aL., 2007). CRISPRFinder (Grissa et aL., 2007) was used to identify the CRISPR repeat-spacer sequences.

### Supplementary Information

[0148] 16S rDNA Sequence of KPA171202

[0149] All sequenced P. acnes genomes encode three copies of 16S rRNA genes, which are identical within each isolate, except KPA171202. Based on the KPA171202 genome (Bruggemann et aL., 2004), one copy of the 16S rRNA gene has one nucleotide difference from the other two identical copies of RT1. However, this mutation was never observed in the 16S rDNA dataset. Multiple clones of 16S rDNA gene from KPA171202 were amplified, cloned, and sequenced and a sequence harboring this mutation was not found. Thus, KPA171202 also has three identical copies of 16S rDNA.

Comparison of P. acnes Strain Distribution to Other Human Microbiome Datasets

[0150] To determine whether the P. acnes ribotypes and their relative abundances measured in this study are unique to pilosebaceous units, a similar analysis to the microbiome 16S rDNA data from the Human Microbiome Project (HMP) and the data from Grice et aL. (2009) were applied. Both datasets were obtained from healthy subjects. The relative abundance of the major ribotypes in healthy subjects from the study was largely similar to that found in these two datasets despite the fact that they were sampled from different anatomical sites (FIG. 3). RT6 (6.3%) was found to be more abundant than RT4 and RT5 combined (2.8%) in the HMP data, similar to those found in the normal cohort where RT6 represents 4.8% and RT4 and RT5 combined represent 1.2% of the clones. The same five main microbiome types were observed in the two datasets (FIG. 7).

### Genome Clustering and Phylogenetic Tree

[0151] The recA gene has been widely used to classify P. acnes strains into four known types: IA, IB, II, and III (McDowell et aL., 2008; McDowell et aL., 2005). The phylogenetic tree of the 71 genomes based on the SNPs in the core genome matched the recA types perfectly except one isolate, HL097PA1. Most of the genomes with ribotypes 1, 4, 5, and 532 were grouped to recA Type IA clade, which can be further divided into subclades IA-1 and IA-2. Clade IA-2 is composed of mostly RT4 and RT5. RT4 and most of RT5 genomes seem to belong to the same lineage with very similar genome sequences. All the isolates with ribotypes 3, 8, and 16, who share the mutation of T1007C in the 16S rDNA gene, were grouped to recA Type IB clade. Most of the RT3 genomes form a subclade IB-2 and RT8 genomes form a subclade by themselves, IB-1, which was highly associated with acne. Notably, RT2 and RT6, who share T854C mutation, have a more distant phylogenetic relationship to other ribotypes, and were grouped to the recA Type II clade. This is consistent with previous studies (Lomholt and Kilian, 2010; McDowell et aL., 2005). P. acnes isolates with recA type III were not found in the samples.

[0152] The associations of P. acnes lineages with health and disease states were further analyzed. There was a clear shift of the association strength of the clades with acne along the phylogenetic tree (FIG. 9). The three sequenced ribotypes identified as being strongly associated with acne (RT4, RT5, and RT8) were found at one end of the tree in clades IA-2 and IB-1, while the RT6 identified as being associated with normal skin was at the other end of the tree at the tip of clade II (FIG. 9).

### Antibiotic Resistance

[0153] P. acnes ribotypes 4, 5, and 10 have a single nucleotide substitution G1058C in the 16S rDNA sequences, which has previously been shown to confer increased resistance to tetracycline (Ross et aL., 1998a; Ross et aL., 2001). In addition to the substitution in the 16S rDNA sequences, it was determined that all the strains of RT4 and RT5 that were sequenced have a nucleotide substitution in the 23S rDNA sequences, which confers increased resistance to a different class of antibiotics, erythromycin and clindamycin (Ross et aL., 1997; Ross et aL., 1998b). It was experimentally confirmed that these isolates, except two that were unculturable, were resistant to tetracycline, erythromycin, and clindamycin.

[0154] It was also examined whether the enrichment of these ribotypes in the acne group could be due to antibiotic treatment. However, in the study only a small percentage of the subjects harboring ribotypes 4, 5, or 10 were treated with antibiotics (Table 4).

TABLE 4
Past and current treatments of the subjects

| | Group | | | |
|---|---|---|---|---|
| | Acne | | Normal | |
| | Number of subjects | | | |
| | 49 | | 52 | |
| | with RT4, | without | with RT4, | without |
| | RT5, or | RT4, RT5, | RT5, or | RT4, RT5, |
| | RT10 | and RT10 | RT10 | and RT10 |
| Number of subjects | 20 | 29 | 9 | 43 |
| in each subgroup | | | | |
| Subjects reported | 14 | 25 | 8 | 31 |
| on current treatment | | | | |
| no treatment | 10 | 21 | 8 | 30 |
| antibiotics | 0 | 2 | 0 | 0 |
| retinoids | 3 | 2 | 0 | 0 |
| antibiotics and | 0 | 0 | 0 | 1 |
| retinoids | | | | |
| unknown | 1 | 0 | 0 | 0 |
| Subjects reported | 12 | 22 | 8 | 31 |
| on past treatment | | | | |
| no treatment | 5 | 16 | 6 | 28 |
| antibiotics | 2 | 4 | 0 | 1 |
| retinoids | 4 | 1 | 1 | 2 |
| antibiotics and | 1 | 0 | 1 | 0 |
| retinoids | | | | |
| unknown | 0 | 1 | 0 | 0 |

[0155] Eighteen of the 29 subjects who harbored any of these three ribotypes gave reports on both past and current treatments. Among them, 50% ( 9/18) of the subjects were never treated; 33% ( 6/18) were treated with retinoids; 11% ( 2/18) were treated with antibiotics in the past, and 5.6% ( 1/18) were treated with both antibiotics and retinoids in the past. The theory of selection by antibiotic treatment is not favored by this study. Previous surveys of antibiotic resistant strains in acne patients demonstrated that previous use of antibiotics did not always result in the presence of resistant strains and that some patients without previous use of antibiotics harbored resistant strains (Coates et aL., 2002; Dreno et aL., 2001). Observations in this study are consistent with previous studies.

### CRISPR Spacer Sequences

[0156] Although more similar to the GC content of P. acnes genomes, four unique spacer sequences found in strains of RT2 and RT6 have the best matches to the genome of Clostridium leptum, a commensal bacterium in the gut microbiota (Table 3). On the 55 Kb plasmid harbored in HL096PA1 and other RT4 and RT5 genomes, there is also a large cluster of 35 genes that are identical to the genes found in C. leptum, including the Tad locus.

### Materials and Methods

[0157] Metagenomic DNA Extraction, PCR Amplification, Cloning and 16S rDNA Sequencing Metagenomic DNA extraction

[0158] Individual microcomedones were isolated from the adhesive nose strip using sterile forceps and placed in a 2 mL sterile microcentrifuge tube filled with ATL buffer (Qiagen) and 0.1 mm diameter glass beads (BioSpec Products, Inc., Bartlesville, OK). Cells were lysed using a beadbeater for 3 minutes at 4,800 rpm at room temperature. After centrifugation at 14,000 rpm for 5 minutes, the supernatant was retrieved and used for genomic DNA extraction using QIAamp DNA Micro Kit (Qiagen). The manufacturer protocol for extracting DNA from chewing gum was used. Concentration of the genomic DNA was determined by NanoDrop 1000 Spectrophotometer.

16S rDNA PCR Amplification, Cloning and Sequencing

[0159] Most of the metagenomic samples were amplified in triplicate using 16S rDNA specific primers with the following sequences: 27f-MP 5′-AGRGTTTGATCMTGGCTCAG-3′ (SEQ ID NO 435) and 1492r-MP 5′-TACGGYTACCTTGTTAYGACTT-3′ (SEQ ID NO 436). PCR reactions contained 0.5 U/μL Platinum Taq DNA Polymerase High Fidelity (Invitrogen), 1× Pre-mix E PCR buffer from Epicentre Fail-Safe PCR system, 0.12 μM concentration of each primer 27f-MP and 1492r-MP, and Sigma PCR grade water. One microliter of DNA (ranging from 0.2-10 ng total) was added to each reaction. The G-Storm GS4 thermocycler conditions were as following: initial denaturation of 96° C. for 5 minutes, and 30 cycles of denaturation at 94° C. for 30 seconds, annealing at 57° C. for 1 minute, and extension at 72° C. for 2 minutes, with a final extension at 72° C. for 7 minutes. Following amplification, an A-tailing reaction was performed by the addition of 1 U of GOTaq® DNA Polymerase directly to the amplification reaction and incubation in the thermocycler at 72° C. for 10 minutes.

[0160] The three PCR amplification reactions from each source DNA were pooled and gel purified (1.2% agarose gel stained with SYBR Green fluorescent dye). The 1.4 Kb product was excised and further purified using the Qiagen QlAquick Gel Extraction kit®. The purified product was cloned into OneShot® E. coli cells using TOPO TA® cloning kit from Invitrogen.

[0161] White colonies were picked into a 384-well tray containing terrific broth, glycerol, and kanamycin using a Qpix picking robot. Each tray was prepared for sequencing using a magnetic bead prep from Agilent and sequenced with 1/16th Big Dye Terminator from ABI. Sequencing was done with a universal forward, universal reverse, and for a subset, internal 16S rDNA primer 907R with sequences of TGTAAAACGACGGCCAGT (forward) (SEQ ID NO: 437), CAGGAAACAGCTATGACC (reverse) (SEQ ID NO: 438), and CCGTCAATTCCTTTRAGTTT (907R) (SEQ ID NO: 439). Sequence reactions were loaded on ABI 3730 machines from ABI on 50 cm arrays with a long read run module.

[0162] A slightly different PCR and cloning protocol without automation was used for several initial samples as described below. 16S rDNA was amplified using universal primers 8F (5′-AGAGTTTGATYMTGGCTCAG-3′) (SEQ ID NO: 468) and 1510R (5′-TACGGYTACCTTGTTACGACTT-3′) (SEQ ID NO: 469) (Gao et aL., 2007). Thermocycling conditions were as following: initial denaturation step of 5 minutes at 94° C., 30 cycles of denaturation at 94° C. for 45 seconds, annealing at 52° C. for 30 seconds and elongation at 72° C. for 90 seconds, and a final elongation step at 72° C. for 20 minutes. elongation at 72° C. for 90 seconds, and a final elongation step at 72° C. for 20 minutes.

[0163] PCR products were purified using DNA Clean and Concentrator Kit (Zymo Research). Subsequently, the 16S rDNA amplicons were cloned into pCR 2.1-TOPO vector (Invitrogen). One-Shot TOP-10 Chemically Competent E. coli cells (Invitrogen) were transformed with the vectors and plated on selective media. Individual positive colonies were picked and inoculated into selective LB liquid medium. After 14 hours of incubation, the plasmids were extracted and purified using PrepEase® MiniSpin Plasmid Kit (USB Corporation) or Zyppy® Plasmid Miniprep Kit (Zymo Research). The clones were sequenced bidirectionally using Sanger sequencing method with ⅛th chemistry using ABI 3730 sequencer (Applied Biosystems Inc.).

P. acnes Isolation and Culturing

### Sample Culture Plate

[0164] Microcomedones on the inner surface of the nose strip were mashed and scraped using a sterile loop (Fisherbrand, Pittsburgh, PA), and plated onto a blood agar plate (Teknova Brucella Agar Plate with Hemin and Vitamin K, Teknova, Hollister, CA). The plates were incubated at 37° C. for 5-7 days anaerobically using the AnaeroPack System (Mitsubishi Gas Chemical Company, Tokyo, Japan).

### Isolation and Culturing of Individual Strains

[0165] Colonies with the macroscopic characteristics of P. acnes were picked from each sample plate and were streaked onto A-media plates (Pancreatic Digase of Casine, Difco yeast extract, glucose, KH2PO4, MgSO4, Difco Agar, and water). These first-pass plates were then incubated anaerobically at 37° C. for 5-7 days. As the second pass, single isolated colonies were picked from the first-pass plates and streaked onto new A-Media plates. These plates were then incubated anaerobically at 37° C. for 5-7 days. The colonies on these plates were picked for culturing, genotyping, and genome sequencing in the subsequence steps.

Genotyping of the P. acnes Isolates

[0166] Each isolate was analyzed by PCR amplification of the 16S rDNA gene. The ribotypes were determined based on the full length sequences. Isolates with desired ribotypes were selected for future culturing and genome sequencing.

Genomic DNA extraction of P. acnes isolates Isolates were grown in 5 mL of Clostridial medium under anaerobic conditions at 37° C. for 5-7 days. Cultures were pelleted by centrifugation and washed with 3 mL phosphate buffer saline (PBS). The same protocol used for the metagenomic DNA extraction was used for extracting the genomic DNA of the isolates.

### Metagenomic Shotgun Sequencing and Analysis

[0167] Metagenomic DNA samples from microcomedone samples from 22 individuals with normal skin were pooled and sequenced using Roche/454 FLX. The average read length was 236 bp. The sequencing was limited with 13,291 sequence reads. Sequence reads were aligned against the NCBI's non-redundant database using BLAST. Species assignment was based on 97% identity and 100% of the read length aligned.

Assembly, Alignment and Editing of 16S rDNA Sequences

### Assembly and Alignment

[0168] Base calling and quality were determined with Phred (Ewing and Green, 1998; Ewing et al., 1998) using default parameters. Bidirectional reads were assembled and aligned to a core set of NAST-formatted sequences (rRNA16S.gold) using AmosCmp16 Spipeline and NAST-ier, which are from the Microbiome Utilities Portal of the Broad Institute (microbiomeutil.sourceforge.net/). These tools in turn use Amoscmp (Pop et al., 2004), Mummer (Kurtz et al., 2004), Lucy (Chou and Holmes, 2001), BLAST (Altschul et al., 1990) and CdbTools (compbio.dfci.harvard.edu/tgi/software/). Suspected chimeras were identified using ChimeraSlayer and WigeoN (Haas et al., 2011). Sequences with at least 90% bootstrap support for a chimeric breakpoint (ChimeraSlayer) or containing a region that varies at more than the 99% quantile of expected variation (WigeoN) were removed from further analysis.

### Quality Screening

[0169] For diversity analysis of the P. acnes population, sequences with at least 99% identity over 1,400 nucleotides to P. acnes KPA171202 (Bruggemann et aL., 2004) 16S rDNA were trimmed to positions 29-1483 (numbering based on the E. coli system of nomenclature (Brosius et aL., 1978)). Sequences without full coverage over this region were excluded from further strain level analysis. Chimera screening, as described above, resulted in removal of less than 0.35% of the sequences. This may be an under-estimation of the chimeras, since the majority of sequences differ by only 1 or 2 nucleotides. Low quality sequences were excluded, defined as more than 50 nucleotides between positions 79 and 1433 with Phred quality scores of less than 15. To allow detailed strain-level analysis, the data were extensively manually edited. Chromatograms were visually inspected at all bases with a Phred quality score<30, and appropriate corrections were applied. For analysis at the species level, the 16S rDNA sequences were not manually edited. Chimera screening of assembled sequences resulted in removal of less than 0.65% of the sequences. Aligned sequences were trimmed to E. coli equivalent positions 29-1483 (Brosius et aL., 1978). Sequences without full coverage over this region were excluded from further analysis.

### Sequence Editing

[0170] Nearly 62,000 Sanger sequence reads representing the 26,446 assembled P. acnes sequences were mapped to the RT1 sequence in CONSED (Gordon, 2003; Gordon et aL., 1998). Comprehensive semi-manual editing of the large number of sequences was made feasible by their very high pairwise similarities: a median of only one nucleotide change from RT1 per sequence (three nucleotide changes prior to editing). Editing was facilitated by the use of scripts and the custom navigation feature of CONSED allowing single click jumps to sites requiring inspection. Chromatograms were inspected for all low quality (Phred<30) bases that differed from RT1, and corrected as needed, including many commonly occurring sequence errors. In order to minimize the effect of base mis-incorporation and chimera, specific base differences from RT1 occurring in less than 4 sequences (frequency<0.00015) were considered unreliable and reverted to the corresponding RT1 base. Ribotypes were assigned for the resulting sequences based on 100% identity.

16S rDNA Sequence Analysis

### OTUs and Taxonomy Assignments

[0171] QIIME (Caporaso et aL., 2010b) was used to cluster the sequences into OTUs using 99% identity cutoff, furthest neighbor, and UCLUST (Edgar, 2010). Representative sequences (most abundant) were selected and aligned using PYNAST (Caporaso et aL., 2010a) to the greengenes database. Taxonomy was assigned using RDP method (Cole et aL., 2009). The alignment was filtered with the lanemask provided by greengenes, and a phylogenetic tree was built using FastTree (Price et aL., 2009).

Wilcoxon Test on the Top Ten Ribotypes For each sample, the number of clones of each of the top ten ribotypes was normalized by the total number of P. acnes clones of the sample. The normalized counts were used to test the significance in enrichment between the acne group and the normal group. The function wilcox_test in the R program (found on the World Wide Web at R-project.org) was used to calculate the p-values.
Microbiome type assignments

[0172] Microbiome types were assigned based on the largest clades seen when samples were clustered using thetayc similarity in MOTHUR (Schloss et aL., 2009) (FIGS. 5 and 6) or hierarchical clustering (Eisen et aL., 1998) (FIG. 7).

### Assigning Ribotypes to Datasets of HMP and Grice et al. 2009

[0173] Sequences were assigned to a ribotype if they met the following criteria. First, there was a single best match. Second, it covered the range required to discriminate between the top 45 ribotypes (58-1388). Third, there were no Ns at discriminatory positions. Lastly, there were no more than ten non-discriminatory differences.

[0174] The HMP 16S rDNA Sanger sequence dataset was downloaded with permission from the HMP Data Analysis and Coordination Center. It has 8,492 P. acnes sequences from 14 subjects and nine body sites (retroauricular crease, anterior nares, hard palate, buccal mucosa, throat, palatine tonsils, antecubital fossa, saliva, and subgingival plaque). More details on the dataset can be found on the World Wide Web at ncbi.nlm.nih.gov/projects/gap/cgi-bin/study.cgi?study_id=phs000228.v2.p1. In this dataset, low quality bases (Phred quality<20) were converted to Ns, and 26% of the sequences were not assigned due to excessive Ns or Ns at ribotype discriminatory sites. Less than 1% was unresolved due to equal best matches or greater than ten mismatches to RT1.

[0175] The dataset from Grice et aL. (2009) is available at NCBI (GenBank accession numbers GQ000001 to GQ116391). It has 22,378 P. acnes sequences from ten subjects and 21 skin sites (buttock, elbow, hypothenar palm, volar forearm, antecubital fossa, axillary vault, gluteal crease, inguinal crease, interdigital web space, nare, plantar heel, popliteal fossa, toe web space, umbilicus, alar crease, back, external auditory canal, glabella, manubrium, occiput, and retroauricular crease). Three percent of the sequences were unassigned due to greater than ten mismatches to RT1, and 1.6% was unassigned due to equal best matches.

[0176] For comparison purpose, the unedited 16S rDNA sequences were assigned to ribotypes by the same method described above and the result is shown in FIG. 3. Less than 0.6% of the sequences were unassigned due to greater than ten mismatches to RT1, and 1.7% was unassigned due to equal best matches.

Whole Genome Shotgun Sequencing, Assembly and Annotation of 66 P. acnes Isolates

### Genome HL096PA1

[0177] The genome was sequenced using Roche/454 FLX at the UCLA Genotyping and Sequencing Core. A total of 590,054 sequence reads were generated with an average read length of 230 bp. Of these, 433,896 were assembled into two contigs, a circular main chromosome of 2,494,190 bp and a linear plasmid of 55,585 bp. Assembly was accomplished by a combination of PHRAP/CONSED (Gordon et aL., 1998) and GSMAPPER (Roche) with extensive manual editing in CONSED. GeneMark v2.6r (Borodovsky and Mclninch, 1993) and GLIMMER v2.0 (Salzberg et aL., 1998) were used to performed ab initio protein coding gene prediction. tRNAScan-SE 1.23 was used for tRNA identification and RNAmmer was used for predicting ribosomal RNA genes (5S, 16S, and 23S). Genome annotation results were based on automated searches in public databases, including Pfam (pfam.jouy.inra.fr/), KEGG (found on the World Wide Web at genome.jp/kegg), and COG (found on the World Wide Web at ncbi.nlm.nih.gov/COG/). Manual inspection of the annotation was also performed.

Genomes of the other 65 Isolates The genomes were sequenced using Illumina/Solexa Genome Analyzer IIx and annotated by the Genome Center of Washington University at St. Louis.

### Assembly

[0178] Each genomic DNA sample was randomly sheared and an indexed library was constructed using standard Illumina protocols. Twelve uniquely tagged libraries were pooled and run on one lane of a GAIIx flowcell and paired end sequences were generated. Following deconvolution of the tagged reads into the separate samples, datasets were processed using BWA (Li and Durbin, 2009) quality trimming at a q10 threshold. Reads trimmed to less than 35 bp in length were discarded and the remaining reads were assembled using oneButtonVelvet, an optimizer program that runs the Velvet assembler (Zerbino and Birney, 2008) numerous times over a user supplied k-mer range while varying several of the assembler parameters and optimizing for the assembly parameter set which yields the longest N50 contig length.

### Annotation

[0179] Coding sequences were predicted using GeneMark v3.3 (Borodovsky and Mclninch, 1993) and GLIMMER v2.13 (Salzberg et aL., 1998). Intergenic regions not spanned by GeneMark and GLIMMER were aligned using BLAST against NCBI's non-redundant database and predictions were generated based on protein alignments. tRNA genes were determined using tRNAscan-SE 1.23 and non-coding RNA genes were determined by RNAmmer-1.2 and Rfam v8.0. The final gene set was processed through a suite of protein categorization tools consisting of Interpro, psort-b and KEGG. The gene product naming comes from the BER pipeline (JCVI). A more detailed standard operating protocol (SOP) can be found at hmpdacc.org/doc/sops/reference_genomes/annotation/WUGC_SOP_DACC.pdf.

71 P. acnes Genome Analysis and Comparison
Identification of the Core Regions of P. acnes Genomes

[0180] The “core” regions were defined as genome sequences that are present in all 71 genomes. P. acnes KPA171202 was used as the reference genome. Each of the other 70 genome sequences (a series of contigs in most of the genomes and two complete genomes) was mapped to the reference genome using Nucmer (Kurtz et aL., 2004). All the 70 “.coords” output files of Nucmer program were analyzed to identify overlap regions based on the KPA171202 coordinates using a Perl script. Finally, “core” sequences were extracted based on the genome sequence of KPA171202 with the coordinates calculated above. On average, 90% (ranging from 88% to 92%) of the genomes were included in the core regions.

### Identification of SNPs in the Core Regions

[0181] Single nucleotide polymorphisms (SNPs) were identified by using “show-snps” utility option of the Nucmer program (Kurtz et aL., 2004) with the default settings. Genome sequence of P. acnes KPA171202 was used as the reference genome. All the 70 “.snps” output files of Nucmer program were analyzed to identify unique SNP positions based on the KPA171202 coordinates using a Perl script. The SNPs in the core regions were further analyzed to construct a phylogenetic tree.

### Phylogenetic Tree Construction

[0182] The 71 concatenated sequences of the 96,887 SNP nucleotides in the core regions were used to construct a phylogenetic tree of the P. acnes genomes. The evolutionary distance of the core regions among the genomes was inferred using the Neighbor-Joining method (Saitou and Nei, 1987). The bootstrap tree inferred from 1,000 replicates was taken. Branches corresponding to partitions reproduced in less than 80% bootstrap replicates were collapsed. FIG. 8 shows only the topology. In FIG. 9, the tree was drawn to scale, with branch lengths in the same units as those of the evolutionary distances used to infer the phylogenetic tree. The evolutionary distances were computed using the p-distance method and are in the units of the number of nucleotide differences per site. This tree shows the comparison based on only the core regions. The distance does not represent the true evolutionary distance between different genomes, since the non-core regions of each genome were not considered here. All positions containing gaps and missing data were eliminated. Evolutionary analysis was conducted using MEGA5 (Tamura et aL., 2007).

### Gene Content Comparison

[0183] In order to assess the conservation of gene content across the 71 genomes, protein coding genes in all the genomes were clustered using UCLUST (Edgar, 2010) by first sorting by decreasing length then clustering each sequence to an existing seed sequence if it had at least 90% nucleotide identity over its entire length, otherwise it became a new seed. For visualization, the data were reformatted to columns and rows representing genes and genomes, respectively. One or more copies of the genes in a genome were treated as present. Gene columns were sorted by their position based on the coordinates of the HL096PA1 genome, a fully finished genome with a 55 Kb plasmid. Genome rows were sorted by their positions in the SNP-based Neighbor Joining tree described above.

### Identification of CRISPR/Cas

[0184] CRISPRFinder (Grissa et aL., 2007) was used to identify the CRISPR repeat-spacer sequences. The annotation of HL110PA3 was used for BLAST alignment in order to identify the presence of CRISPR/Cas structure and CRISPR repeat-spacer sequences in strains of HLOO1 PA1, HL060PA1, HL082PA2, HL103PA1, HL106PA1, HL110PA4 and J139. Each spacer sequence was annotated by BLAST alignment against NCBI's non-redundant nucleotide database and the reference genomic sequences database (refseq_genomic).

### Sequence Coverage Analysis

[0185] MAQ (Li et aL., 2008) was used to map the raw sequence reads from Illumina/Roche platform to the reference genomes. Briefly, “map” command was used for mapping, and “assemble” command was used for calling the consensus sequences from read mapping, then “cnd2win” command was used to extract information averaged in a tilling window. A window size of 1,000 bp was used. Randomly selected 1 million reads were used for mapping. This accounted for approximately 40× coverage for all the genomes except HL096PA2, HL096PA3, HL097PA1 and HL099PA1, which had approximately 55× to 75× coverage. BWA (Li and Durbin, 2010) was used to map the raw sequence reads from Roche/454 platform to the reference genome HL096PA1. The average coverage was calculated in 1,000 bp window.

### Quantitative PCR

[0186] Quantitative PCR (qPCR) targeting TadA on the plasmid (Locus 3) and housekeeping genes Pak and RecA on the chromosome was performed using the genomic DNA extracted from the P. acnes isolates. LightCyler 480 High Resolution Melting Master kit was used (Roche Diagnostics GmbH, Mannheim, Germany). Each 10 μL reaction solution was consisted of 5 μL master mix (2× concentrate), 1 μL 25 mM MgCl2, 0.5 μL 4 μM forward and reverse primers, and DNA template.

[0187] Four qPCR runs were performed on Roche LightCycler 480. Primer sequences for TadA are 5′-GATAATCCGTTCGACAAGCTG-3′ (forward) (SEQ ID NO: 15) and 5′-ACCCACCACGATGATGTTT-3′ (reverse) (SEQ ID NO: 16). Primer sequences for pak are 5′-CGACGCCTCCAATAACTTCC-3′ (forward) (SEQ ID NO: 472) and 5′-GTCGGCCTCCTCAGCATC-3′ (reverse) (SEQ ID NO: 473). Primer sequences for recA are 5′-CCGGAGACAACGACAGGT-3′ (forward) (SEQ ID NO: 474) and 5′-GCTTCCTCATACCACTGGTCATC-3′ (reverse) (SEQ ID NO: 475). All samples were run in duplicates in each qPCR run, except the second run, which was not duplicated. Thermocycling conditions were as following: initial activation step of 10 minutes at 95° C.; 50 amplification cycles with each consisting of 10 seconds at 95° C., seconds at 65° C. in the first cycle with a stepwise 0.5° C. decrease for each succeeding cycle, and 30 seconds at 72° C.; and final melting curve step starting at 65° C. and ending at 990C with a ramp rate of 0.02° C./s and acquisition rate of 25°/C. DNA concentration standards were run in duplicates. Copy number ratios of genes were calculated based on the concentrations of the genes on the plasmid and chromosome.

### Data Availability

[0188] 16S rDNA sequences have been deposited at GenBank under the project ID 46327. Whole genome shotgun sequences and annotations of the P. acnes strains have been deposited at GenBank under the accession numbers ADWB00000000, ADWC00000000, ADWF00000000, ADWH00000000, ADW100000000, ADXP00000000, ADXQ00000000, ADXR00000000, ADXS00000000, ADXT00000000, ADXU00000000, ADXW00000000, ADXX00000000, ADXY00000000, ADXZ00000000, ADYA00000000, ADYB00000000, ADYC00000000, ADYD00000000, ADYE00000000, ADYF00000000, ADYG00000000, ADY100000000, ADYJ00000000, ADYK00000000, ADYL00000000, ADYM00000000, ADYN00000000, ADYO00000000, ADYP00000000, ADYQ00000000, ADYR00000000, ADYS00000000, ADYT00000000, ADYU00000000, ADYV00000000, ADYW00000000, ADYX00000000, ADYY00000000, ADYZ00000000, ADZA00000000, ADZB00000000, ADZC00000000, ADZD00000000, ADZE00000000, ADZF00000000, ADZG00000000, ADZH00000000, ADZI00000000, ADZJ00000000, ADZK00000000, ADZL00000000, ADZM00000000, ADZN00000000, ADZO00000000, ADZP00000000, ADZQ00000000, ADZR00000000, ADZS00000000, ADZT00000000, ADZV00000000, ADZW00000000, CP003293, and CP003294.

### Example 2—Pan-Genome and Comparative Genome Analysis of PROPIONIBACTERIUM ACNES

[0189] Propionibacterium acnes is a major human skin bacterium. To understand whether different strains have different virulent properties and thus play different roles in health and diseases, the genomes of 82 P. acnes strains, most of which were isolated from acne or healthy skin, were compared. Lineage-specific genetic elements were identified that may explain the phenotypic and functional differences of P. acnes as a commensal in health and as a pathogen in diseases. By analyzing a large number of sequenced strains, an improved understanding of the genetic landscape and diversity of the organism at the strain level and at the molecular level is provided.

### INTRODUCTION

[0190] Propionibacterium acnes is a major commensal of the human skin. It contributes to maintaining the skin health by inhibiting the invasion of common pathogens, such as Staphylococcus aureus and Streptococcus pyogenes. It does so by hydrolyzing triglycerides and releasing free fatty acid that contributes to the acidic pH of the skin surface (1). On the other hand, P. acnes has been historically linked to acne vulgaris, a chronic inflammatory disease of the pilosebaceous unit affecting more than 85% of adolescents and young adults (2). A metagenomic study previously demonstrated that P. acnes was a dominant bacterium in the pilosebaceous unit in both healthy individuals and acne patients (3, 4). At the strain level, however, the population structures of P. acnes were different between the two groups. These findings suggested that microbe-related human diseases are often caused by certain strains of a species rather than the entire species, in line with the studies of other diseases (5, 6).

[0191] P. acnes has been classified into three distinct types. Studies by Johnson and Cummins (7) first revealed two distinct phenotypes of P. acnes, known as types I and II, that could be distinguished based on serological agglutination tests and cell wall sugar analysis. McDowell et aL. (8) differentiated types I and II P. acnes by monoclonal antibody typing. Furthermore, their phylogenetic analysis of P. acnes strains based on the nucleotide sequences of the recA gene and a more variable hemolysin/cytotoxin gene (tly) demonstrated that types I and II represent distinct lineages. Their investigations also revealed that strains within the type I lineage could be further split into two clades, known as types IA and IB (8, 9). An additional phylogenetic group of P. acnes, known as type III was described later (10). Recent studies based on multilocus sequence typing (MLST) further sub-divided P. acnes into closely related clusters, some of which were associated with various diseases including acne (11-13).

[0192] The first complete genome sequence of P. acnes, KPA171202, a type IB strain, provided insights on the pathogenic potential of this Gram-positive bacterium (14). The genome is 2.56 M bp with 60% of GC content. It encodes 2,333 open reading frames (ORFs) including multiple gene products involved in degrading host molecules, such as sialidases, neuraminidases, endoglycoceramidases, lipases, and pore-forming factors. However, the sequence of a single genome does not reflect the genetic landscape of the organism and how genetic variations among strains determine their various phenotypes and pathogenic properties.

[0193] To better understand the human microbiome variations at the strain level, as part of the Human Microbiome project (HMP) (15, 16), previously generated were the reference genome sequences of 66 P. acnes strains selected from a collection of over 1,000 strains isolated from a cohort of healthy subjects and acne patients (4). These 66 strains represent the major lineages of P. acnes found on the human skin, including types IA, IB, and II. To cover all the main P. acnes lineages in the analysis, three additional P. acnes strains were sequenced, including the first available type III P. acnes genome. Thirteen P. acnes genomes sequenced by other research groups (14, 17-22) were also available at the time of analysis. With a total of 82 genomes, performed was a comparative genome analysis to characterize the pan-genome of P. acnes, the phylogenetic relationships among different lineages, the microevolution of the strains in the same individual microbiome, and the genetic elements specific to each lineage and their associations with health and disease.

### Results

[0194] P. acnes Strains and General Genome Features To understand the genomic diversity of this important skin commensal at the strain level, the genomes of 69 sequenced P. acnes strains were analyzed. Among them, 67 P. acnes strains were isolated from the skin of healthy individuals and acne patients (3, 4), and two P. acnes strains, HL201 PA1 and HL202PA1, were isolated from refractory endodontic lesions (23) (Table 5).

TABLE 5
General features of the 82 P. acnes genomes

| Genome | Strain name | Origin | Ribotype | recA type | Sequencing method | Genome size (Mb) | GC % | Number of ORFs |
|---|---|---|---|---|---|---|---|---|
| 1 | HL001PA1 | Skin | 2 | II | IIlumina | 2.49 | 60.0 | 2,661 |
| 2 | HL002PA1 | Skin | 3 | IB | IIlumina | 2.48 | 60.1 | 2,549 |
| 3 | HL002PA2 | Skin | 1 | IA | IIlumina | 2.48 | 60.1 | 2,594 |
| 4 | HL002PA3 | Skin | 1 | IA | IIlumina | 2.48 | 60.1 | 2,565 |
| 5 | HL005PA1 | Skin | 4 | IA | IIlumina | 2.53 | 60.2 | 2,724 |
| 6 | HL005PA2 | Skin | 1 | IA | IIlumina | 2.48 | 60.0 | 2,645 |
| 7 | HL005PA3 | Skin | 1 | IA | IIlumina | 2.48 | 60.1 | 2,579 |
| 8 | HL005PA4 | Skin | 3 | IB | IIlumina | 2.47 | 60.0 | 2,607 |
| 9 | HL007PA1 | Skin | 4 | IA | IIlumina | 2.53 | 60.2 | 2,691 |
| 10 | HL013PA1 | Skin | 3 | IB | IIlumina | 2.48 | 60.0 | 2,618 |
| 11 | HL013PA2 | Skin | 1 | IA | IIlumina | 2.48 | 60.1 | 2,588 |
| 12 | HL020PA1 | Skin | 1 | IA | IIlumina | 2.48 | 60.1 | 2,554 |
| 13 | HL025PA1 | Skin | 1 | IB | IIlumina | 2.54 | 60.1 | 2,581 |
| 14 | HL025PA2 | Skin | 3 | IB | IIlumina | 2.48 | 60.0 | 2,616 |
| 15 | HL027PA1 | Skin | 3 | IB | IIlumina | 2.53 | 60.1 | 2,711 |
| 16 | HL027PA2 | Skin | 1 | IA | IIlumina | 2.48 | 60.1 | 2,629 |
| 17 | HL030PA1 | Skin | 1 | IB | IIlumina | 2.54 | 60.0 | 2,662 |
| 18 | HL030PA2 | Skin | 3 | IB | IIlumina | 2.51 | 60.1 | 2,647 |
| 19 | HL036PA1 | Skin | 532 | IA | IIlumina | 2.48 | 60.1 | 2,575 |
| 20 | HL036PA2 | Skin | 532 | IA | IIlumina | 2.48 | 60.1 | 2,565 |
| 21 | HL036PA3 | Skin | 1 | IA | IIlumina | 2.48 | 60.1 | 2,601 |
| 22 | HL037PA1 | Skin | 3 | IB | IIlumina | 2.48 | 60.1 | 2,617 |
| 23 | HL038PA1 | Skin | 4 | IA | IIlumina | 2.54 | 60.2 | 2,663 |
| 24 | HL042PA3 | Skin | 6 | II | Roche/454 | 2.53 | 60.1 | 2,610 |
| 25 | HL043PA1 | Skin | 5 | IA | IIlumina | 2.53 | 60.2 | 2,698 |
| 26 | HL043PA2 | Skin | 5 | IA | IIlumina | 2.53 | 60.2 | 2,688 |
| 27 | HL045PA1 | Skin | 4 | IA | IIlumina | 2.53 | 60.2 | 2,692 |
| 28 | HL046PA1 | Skin | 3 | IB | IIlumina | 2.48 | 60.0 | 2,599 |
| 29 | HL046PA2 | Skin | 1 | IA | IIlumina | 2.53 | 60.1 | 2,692 |
| 30 | HL050PA1 | Skin | 3 | IB | IIlumina | 2.48 | 60.0 | 2,652 |
| 31 | HL050PA2 | Skin | 1 | II | IIlumina | 2.46 | 60.1 | 2,581 |
| 32 | HL050PA3 | Skin | 3 | IB | IIlumina | 2.48 | 60.0 | 2,558 |
| 33 | HL053PA1 | Skin | 4 | IA | IIlumina | 2.53 | 60.2 | 2,632 |
| 34 | HL053PA2 | Skin | 8 | IB | IIlumina | 2.51 | 60.1 | 2,664 |
| 35 | HL056PA1 | Skin | 4 | IA | IIlumina | 2.48 | 60.1 | 2,581 |
| 36 | HL059PA1 | Skin | 16 | IB | IIlumina | 2.48 | 60.1 | 2,570 |
| 37 | HL059PA2 | Skin | 16 | IB | IIlumina | 2.48 | 60.0 | 2,535 |
| 38 | HL060PA1 | Skin | 2 | II | IIlumina | 2.48 | 60.1 | 2,601 |
| 39 | HL063PA1 | Skin | 1 | IA | IIlumina | 2.48 | 60.1 | 2,520 |
| 40 | HL063PA2 | Skin | 3 | IB | IIlumina | 2.53 | 60.0 | 2,669 |
| 41 | HL067PA1 | Skin | 3 | IB | IIlumina | 2.53 | 60.1 | 2,633 |
| 42 | HL072PA1 | Skin | 5 | IA | IIlumina | 2.53 | 60.1 | 2,594 |
| 43 | HL072PA2 | Skin | 5 | IA | IIlumina | 2.53 | 60.1 | 2,672 |
| 44 | HL074PA1 | Skin | 4 | IA | IIlumina | 2.53 | 60.2 | 2,723 |
| 45 | HL078PA1 | Skin | 1 | IA | IIlumina | 2.58 | 60.1 | 2,785 |
| 46 | HL082PA1 | Skin | 8 | IB | IIlumina | 2.50 | 60.1 | 2,648 |
| 47 | HL082PA2 | Skin | 2 | II | IIlumina | 2.51 | 60.0 | 2,644 |
| 48 | HL083PA1 | Skin | 1 | IA | IIlumina | 2.48 | 60.1 | 2,575 |
| 49 | HL083PA2 | Skin | 3 | IB | IIlumina | 2.48 | 60.0 | 2,633 |
| 50 | HL086PA1 | Skin | 8 | IB | IIlumina | 2.53 | 60.1 | 2,610 |
| 51 | HL087PA1 | Skin | 3 | IB | IIlumina | 2.48 | 60.1 | 2,584 |
| 52 | HL087PA2 | Skin | 1 | IA | IIlumina | 2.48 | 60.1 | 2,572 |
| 53 | HL087PA3 | Skin | 3 | IB | IIlumina | 2.52 | 60.1 | 2,619 |
| 54 | HL092PA1 | Skin | 8 | IB | IIlumina | 2.50 | 60.1 | 2,590 |
| 55 | HL096PA1 | Skin | 5 | IA | Roche/454 | 2.49 | 60.0 | 2,393 |
| 56 | HL096PA2 | Skin | 5 | IA | IIlumina | 2.56 | 60.1 | 2,638 |
| 57 | HL096PA3 | Skin | 1 | IA | IIlumina | 2.56 | 60.0 | 2.651 |
| 58 | HL097PA1 | Skin | 5 | IC | IIlumina | 2.52 | 60.2 | 2,617 |
| 59 | HL099PA1 | Skin | 4 | IA | IIlumina | 2.58 | 60.1 | 2,735 |
| 60 | HL100PA1 | Skin | 1 | IA | IIlumina | 2.48 | 60.1 | 2,562 |
| 61 | HL103PA1 | Skin | 2 | II | IIlumina | 2.48 | 60.1 | 2,546 |
| 62 | HL106PA1 | Skin | 2 | II | IIlumina | 2.48 | 60.1 | 2,533 |
| 63 | HL106PA2 | Skin | 1 | IA | IIlumina | 2.48 | 60.1 | 2,567 |
| 64 | HL110PA1 | Skin | 8 | IB | IIlumina | 2.51 | 60.1 | 2,667 |
| 65 | HL110PA2 | Skin | 8 | IB | IIlumina | 2.50 | 60.1 | 2,614 |
| 66 | HL110PA3 | Skin | 6 | II | IIlumina | 2.54 | 60.1 | 2,806 |
| 67 | HL110PA4 | Skin | 6 | II | IIlumina | 2.54 | 60.1 | 2,724 |
| 68 | HL201PA1 | Refractory endodontic lesion | 6 | III | IIlumina | 2.48 | 60.1 | 2,629 |
| 69 | HL202PA1 | Refractory endodontic lesion | Not assigned | II | IIlumina | 2.56 | 60.0 | 2,821 |
| 70 | KPA171202 | Plate | 1 | IB | Sanger | 2.56 | 60.0 | 2,297 |
| 71 | J139 | Skin | 2 | II | Roche/454 | 2.48 | 60.0 | 2,364 |
| 72 | J165 | Skin | 1 | IA | Roche/454 | 2.50 | 60.0 | 2,403 |
| 73 | SK137 | Skin | 1 | IA | Roche/454 | 2.50 | 60.0 | 2,352 |
| 74 | SK187 | Skin | 3 | IB | Roche/454 | 2.51 | 59.0 | 2,381 |
| 75 | SK182 | Skin | 1 | IA | Roche/454 | 2.48 | 60.0 | 2,338 |
| 76 | 266 | Pleuropulmonary infection | 1 | IA | Roche/454 | 2.50 | 60.0 | 2,412 |
| 77 | 6609 | Skin | 1 | IB | Solid | 2.56 | 60.0 | 2,358 |
| 78 | ATCC11828 | Abscess | 2 | II | Solid | 2.49 | 60.0 | 2,260 |
| 79 | P.acn17 | Corneal scrape | 3 | IB | Solid | 2.52 | 60.0 | 2,266 |
| 80 | P.acn31 | Aqueous humour | 3 | IB | Solid | 2.50 | 60.0 | 2.247 |
| 81 | P.acn33 | Aqueous humour | 3 | IB | Solid | 2.49 | 60.0 | 2,236 |
| 82 | PRP-38 | Skin | 5 | IC | Solid | 2.51 | 60.0 | 2,233 |

[0195] These 69 strains cover all the known P. acnes lineages isolated to date. The strains were classified based on their 16S ribosomal RNA (rRNA) sequences. Each unique 16S rRNA sequence was defined as a ribotype (RT). All the sequenced P. acnes genomes had three identical copies of 16S rRNA. Based on the metagenomic study of the skin microbiome associated with acne (4), among the top ten major ribotypes, RT1, RT2, and RT3 were the most abundant and found in both healthy individuals and acne patients with no significant differences. RT4, RT5, and RT8, however, were enriched in acne patients, while RT6 was mostly found in healthy individuals. The 69 strains included 19 RT1 strains, five RT2 strains, 15 RT3 strains, eight RT4 strains, seven RT5 strains, four RT6 strains, six RT8 strains, four strains of minor ribotypes, and one type 11 strain. The average genome size was 2.50 Mb (ranging from 2.46 to 2.58 Mb) and the GC content was 60%. On average, each genome encoded 2,626 ORFs (ranging from 2,393 to 2,806) (Table 5).

[0196] The analysis included 13 additional P. acnes genomes that were publicly available (14,17-22) (Table 5). The average genome size of these 13 P. acnes strains was 2.51 Mb (ranging from 2.48 to 2.56 Mb) and the GC content was 60%, encoding 2,319 ORFs on average (ranging from 2,233 to 2,412). These 13 genomes include six RT1 strains, two RT2 strains, four RT3 strains, and one RT5 strain, however, no genomes of RT4, RT6, RT8 and type III strains were available. The sequencing effort significantly increased the number of genomes for each P. acnes lineage as well as the number of lineages covered.

P. acnes Pan-Genome

[0197] To determine the genetic landscape of P. acnes, the pan-genome based on the 82 P. acnes genomes was estimated. The number of new genes that would be discovered by sequencing additional P. acnes genomes by using a power law regression analysis, n=κNγ (24), was estimated (FIG. 13). The analysis identified that a was 0.788. The average number of new genes added by a novel genome was three when the 82nd genome was added. The number of P. acnes pan-genes that would be accumulated by sequencing additional P. acnes genomes by using a power law regression analysis, n=κNγ, was then estimated (FIG. 14). The exponent γ was 0.067, and P. acnes had 3,136 pan-genes (N=82). Based on these results, the pan-genome of P. acnes is defined as open, as the exponent α was less than one and γ was greater than zero (24). However, since a was close to one and γ was close to zero, it is believed that this organism evolved tightly without large expansions.

Phylogenetic Relationships Among the P. acnes Genomes

[0198] A genome comparison of the 82 P. acnes strains revealed that 2.20 Mb (88% of the average genome) was shared by all the P. acnes genomes, which are referred to herein as the “core regions.” Within the core regions, 123,223 unique single nucleotide polymorphisms (SNPs) were detected among the strains. Twenty seven percent of the SNPs were unique to type I, 22% were unique to type II, and 22% were unique to type 11 (FIG. 15). A phylogenetic tree based on the 123,223 SNPs in the core regions was constructed (FIG. 16). The tree showed that the recA type classification of the strains was consistent with the major clades based on the genomes. The recA type IA, IB, and II strains were all clustered together within each type, respectively, except HL097PA1 and PRP-38. The only recA type III strain, HL201 PA1, formed a separate branch from type I and type II strains. The tree also showed that the 16S rRNA ribotypes of the strains were consistent with the phylogenetic relationships inferred from the genome sequences. Most of the RT1 strains were clustered in clade IA-1, while all the RT4 and most of the RT5 strains were clustered in clade IA-2. All six RT8 strains were clustered together in clade IB-1. All the RT3 and RT16 strains were clustered together in clade IB-2 except SK187. HL030PA1 and KPA171202 were clustered together with 6609, as a distinct IB-3 clade. HL097PA1 and PRP-38 were clustered together and were classified as a novel type IC recently named by McDowell et aL. (22). All the RT2 strains were clustered in clade II, distant from clade I, together with RT6 strains. HL202PA1, which is a RT6 strain and was isolated from an oral site, was not much different from the skin RT6 isolates and was clustered together. The sequence types of all the strains were assigned based on two published MLST schemes (11,13) and are shown in Table 1. The phylogenetic tree based on the core genome regions demonstrated that 16S ribotyping can be used for P. acnes strain identification and classification. It provides a much higher resolution than recA typing, and in the meantime, it is much simpler and faster with only one gene required than MLST, which is a laborious process generally requiring 7-9 genes.

[0199] The large number of genome sequences that were generated permitted analyzing the P. acnes pan-genome at the clade level. Clades IA, IB and II had 36, 33 and 12 genomes, respectively. Based on the power law regression analyses described above, it was determined that at the clade level P. acnes also has an open pan-genome for recA type IA clade, type IB clade and type II clade with limited expansions (FIG. 17). The expansion rates were not significantly different among the clades and were similar to the one at the species level. This suggests that all the major lineages of P. acnes had evolved at a similar rate.

### SNP Distribution in the Core Genome Regions

[0200] To understand whether there are “hot spots” for mutation and/or recombination in the P. acnes genomes, it was determined whether the SNPs were randomly distributed throughout the genomes or were enriched in particular regions. The frequency of SNPs in each protein coding gene in the core regions was calculated. The average rate of polymorphic sites in the core regions was 5.3%, i.e., 5.3 unique SNPs in every 100 bp. This rate is comparable to the ones found in multiple gut bacterial genomes (25). Among the 1,888 genes encoded in the core regions, 55 genes had higher SNP frequencies with more than two standard deviations (SD), and 47 genes with more than three SD (FIG. 18(A). Using the Kolmogorov-Smirnov (K-S) test, it was demonstrated that these 102 highly mutated genes were not randomly distributed throughout the genome (P<0.01) (FIG. 18(B). This suggests that P. acnes has an evolutionary risk management strategy. Based on the Clusters of Orthologous Groups (COG) categories, the functions of these 102 genes showed a similar distribution as those of all 1,888 genes in the core regions. There was no enrichment of a particular functional category in these frequently mutated genes.

[0201] It was further determined whether the mutations in the core regions were under selection by calculating the ratio of non-synonymous (NS) vs. synonymous (S) SNPs for the 1,888 genes. The average rate of NS mutations was 38%. Among the 1,888 genes, 54 genes had higher NS mutation rates with more than two SD and 13 genes with more than three SD (FIG. 18(C). These 67 genes were randomly distributed in the genome and not particularly enriched in certain regions (P>0.05 with the K-S test) (FIG. 18(D). Most of the 102 genes with higher SNP frequencies did not overlap with these 67 genes, suggesting that independent evolutionary events might lead to these gene alternations. Only ten genes had both high SNP frequencies and high NS mutation rates, all annotated as hypothetical proteins.

Evolutionary Relationships of the Strains Isolated from the Same Individuals

[0202] The large number of P. acnes strains isolated from the cohort of acne patients and healthy individuals allowed the investigation of whether the P. acnes strains in hair follicles from the same individual were clonal. Based on previous metagenomic analysis, it was demonstrated that most individuals harbored multiple P. acnes strains from different lineages (4). However, it was not known whether the strains of the same lineage in the same individual were derived from the same ancestor. Genome sequences of the strains isolated from the same samples makes it possible to examine whether the Strains from the Same Individuals (SSIs) evolved from the same origin via clonal expansion. The 69 sequenced P. acnes strains included 49 SSIs: 13 duets (i.e., 13 pairs of strains isolated from 13 individuals), five trios, and two quartets. Twenty three SSIs were clustered in the same clades, nine in clade IA-1, four in clade IA-2, two in clade IB-1, six in clade IB-2 and two in clade II. The distance (substitution rate at the 123,223 SNP sites in the core regions) between each pair of SSIs was calculated (FIG. 16). The average distance of the SSIs in clade IA-1 was 0.0014, while that of strains from different individuals in clade IA-1 was 0.0064 (P<0.001). Consistent results were observed in other clades including IA-2, IB-1, IB-2, and II (FIG. 19(A)).This demonstrated that the SSIs in the same lineage were significantly more similar to each other than the strains isolated from different individuals, suggesting that they were clonal in each individual. Among the RT4 and RT5 strains within clade IA-2, however, the average distance between SSIs (0.0004) was not significantly different from the average distance between strains from different individuals (0.0017) (P=0.072). Moreover, the average distance between RT4/RT5 strains from different individuals (0.0017) was similar to the average distance between the SSIs in clade IA-1 (0.0014), and even shorter than the average distances between the SSIs in clades IB-1 (0.0059), IB-2 (0.0019) and II (0.0022) (FIG. S3A). This suggests that although isolated from different individuals, these RT4 and RT5 strains seemed to be clonal and had evolved from the same recent ancestor. A similar relationship between the two RT5 strains in clade IC were observed, where HL097PA1 and PRP-38, isolated from different individuals, were closely related to each other with a distance of 0.0012. The metagenomic study has demonstrated a strong association of strains of RT4 and RT5 with acne (4). The clonality of these strains isolated from different individuals suggests that RT4 and RT5 strains may be transmitted among individuals. This finding is consistent with the previous clinical report that antibiotic-resistant Propionibacteria were transmissible between acne-prone individuals including dermatologists (26), as most of the antibiotic-resistant P. acnes strains belong to RT4 and RT5 (4,13). The analysis of SSIs further supports the theory that RT4 and RT5 strains may be a pathogenic factor in acne.

[0203] To determine whether the distances between strain pairs from the same individuals but belonging to different lineages were different from random strain pairs, the distances of any pair of SSIs from different clades were calculated. The average distance of the SSIs between clades IA-1 and IA-2 (i.e., HL005PA3 vs. HL005PA1, HL005PA2 vs. HL005PA1, HL096PA3 vs. HL096PA1, and HL096PA3 vs. HL096PA2) was 0.039, similar to that of the isolates from different individuals (0.040). Similar results were obtained for all other clade pair comparisons (FIG. 19(B). These results demonstrated that the SSIs from different clades were similarly different from each other as to the strains from different individuals. This analysis suggests that in each individual microbiome P. acnes strains undergo clonal expansion in the same population, while multiple strain populations can often co-exist in the same community with little recombination.

### Non-core Genome Regions in Type I Strains

[0204] By comparing the genome sequences of the 82 P. acnes strains, non-core genome regions were identified that were not shared by all 82 strains. The total length of the non-core regions was approximately 0.90 Mb. The average GC content of the non-core regions was slightly lower than that of the core regions, 58%±6.9%, suggesting that part of the non-core regions might be originated from other species via horizontal gene transfer.

[0205] Different lineages of P. acnes strains have distinct non-core regions. Using hierarchical clustering of the non-core regions, it was shown that the strains of the same ribotypes were clustered together with distinct separations among the clades (FIG. 20). Among the non-core regions, the genetic elements specific to each lineage were identified, which may explain the phenotypic and functional differences of the strains in health and disease. In clade IA-2, genomic loci 1, 2 and 3 were identified, which were unique to mainly the RT4 and RT5 strains (4). These loci appear to be originated from mobile elements, encode several virulent genes, and may contribute to the virulence of these strains. In the meantime, the genomic island-like cluster 2 (G12) (18) was uniquely absent in most of the strains in this clade. Clade IB-1 consisted of all RT8 strains, which were also highly associated with acne based on our metagenomic study (4). They all have a unique genomic island (locus 4), which is 20 Kb long and encodes a series of nonribosomal peptide synthetases (NRPS), which may contribute to increased virulence of these strains. Most RT3 and RT16 strains belong to clade IB-2 and have fewer non-core regions than the strains in other clades. This may be explained by the lack of entire rearrangement hot spot (RHS) family proteins, which function in genomic rearrangements as previously implicated in Escherichia coli (27). Clade IB-3 consisted of three strains, including KPA171202. Three of the four genomic islands described previously (18), G11, G13 and G14, were unique to this clade and were absent in all other strains. This analysis suggests that KPA171202, although was the first sequenced complete genome of P. acnes, did not seem to be a common skin P. acnes strain representing one of the major lineages. This result is consistent with previous studies using MLST (11-13). Strains of clade IC belong to RT5. They also contain locus 3, a linear plasmid, which is highly homologous to the locus 3 in the RT4 and RT5 strains of clade IA-2 and encodes a tight adhesion locus originated from Clostridium leptum (4). In general, although strains in different lineages had a similar genome size with similar gain and loss of genetic materials, they harbor distinct genetic elements which may give rise to their different virulent properties.

### Non-Core Genome Regions in Type II Strains

[0206] Strains in clade II, mainly RT2 and RT6, were more distantly related to the strains in clade 1. Based on the metagenomic study, strains in clade II were not associated with acne, as RT2 was evenly distributed between acne patients and healthy individuals, while RT6 was significantly enriched in healthy individuals (4). Compared to type I strains, the genomes of RT2 and RT6 strains lack several regions, which are approximately 92 Kb long in total and encode 107 ORFs. RT2 and RT6 genomes have additional genomic regions with a similar size encoding 93 ORFs (FIG. 20). Based on the COG classification, there were no significant differences in the distribution of the functional categories between the 107 type I specific ORFs and 93 type II specific ORFs.

[0207] The most unique genomic feature of RT2 and RT6 strains is represented by the clustered regularly interspaced short palindromic repeats (CRISPR)/Cas locus (4). CRISPR/Cas system provides acquired bacterial immunity against viruses and plasmids by targeting nucleic acids in a sequence-specific manner (28). All the sequenced strains of RT2 and RT6 encoded a complete set of CRISPR/Cas genes and at least one repeat and spacer sequence, while none of the other ribotype strains did. Based on its complete genome sequence (20), strain ATC1 1828 appeared to be an exception, having only terminal sequence but no spacer sequence. However, using PCR and sequencing it was determined that ATC1 1828 has one repeat-spacer sequence (Table 4).

TABLE 4
CRISPR spacer sequences found in the genomes of ATCC 11828, HL042PA3 and HL202PA1.

| Strain | Ribotype | Spacer | Protspacer | BLAST result | Match found in |
|---|---|---|---|---|---|
| ATCC11828 | RT2 | 1 | CATCTGCCAACGAGCGAGAGTGGCGCGGTGTTC | No hits | |
| | | 2 | CGAGGGCTACCACGTGGTCGATTTGGACTGTCG | Clostridium leptum DSM 753, CLALEP_00167, | Locus 2 |
| | | | | Propionibacterium acnes SK137, HMPREF0675_3193 | |
| | | | | (Domain unknown fucntion) | |
| | | 3 | CAGGCGCTCCACTCCCTCGCCCTGGCCACCAAC | No hits | |
| HL042PA3 | RT6 | 1 | CTGACTGGTTTGGGTCATACGTCTTCTGACACG | Propionibacterium acnes phage PA6 gp14 (tape measure protein) | |
| | | | | Propionibacterium acnes phage PAD20 gp14 (Tape measure | |
| | | | | protein) | |
| | | | | Propionibacterium acnes phage PAS50 gp14 (Tape measure | |
| | | | | protein) | |
| | | 2 | TCACAGGCCACGCAGGCACATCACCCTTATTAG | Propionibacterium acnes phage PA6 gp15 (Minor tail protein) | |
| | | | | Propionibacterium acnes phage PAD20 gp15 (Minor tail protein) | |
| | | | | Propionibacterium acnes phage PAS50 gp15 (Minor tail protein) | |
| | | 3 | CTCCCCCTCCTCCCCGGGAGGAAAAGCAGACCA | Propionibacterium acnes phage PAS50 gp15 (Minor tail protein) | |
| | | 4 | CGAGGGCTACCACGTGGTCGATTTGGACTGTCG | Clostridium leptum DSM 753, CLOLEP_00167, | Locus 2 |
| | | | | Propionibacterium acnes SK137, HMPREF0675_3193 (Domain of | |
| | | | | unknown function) | |
| HL202PA1 | RT6 | 1 | CGAGGGCCTACCACGTGGTCGATTTGGACTGTCG | Clostridium leptum DSM 753, CLOLEP_00167, | Locus 2 |
| | | | | Propionibacterium acnes SK137, HMPREF0675_3193 (Domain of | |
| | | | | unknown function) | |
| | | 2 | CAGGCGCTCCACTCCCTCGCCCTGGCCACCAAC | No hits | |

[0208] A total of 48 spacer sequences were found in the 11 RT2 and RT6 strains, 29 of which were unique. In other bacterial species, it has been established experimentally and computationally that the spacers at the leader-proximal end are more diversified, while the spacers at the leader-distal end are more conserved among strains. The evolutionary relationships among the RT2 and RT6 strains based on their shared spacer sequences were analyzed. HL060PA1 and HL082PA2, which were clustered tightly in clade II, shared the same spacer S2 (FIG. 21). J139, ATC11828, HL110PA4, HL110PA3, and HL202PA1 shared the same spacers S17 and S18 (FIG. 21). These results suggest that these groups of strains probably evolved from the same ancestors before having acquired additional spacers. The relationships among the strains based on shared CRISPR spacers are consistent with the phylogenetic relationships calculated based on the SNPs in the core regions. In addition, multiple type II strains harbored spacer sequences that match to the sequences in loci 2 and 3, which were unique to mainly acne-associated RT4 and RT5 strains (4). The sequences in loci 2 and 3 appeared to be originated from C. leptum and encode potential virulence factors (FIG. S4). These loci may have been acquired by RT4 and RT5 strains, while the genomes of RT2 and RT6 that encode these spacers may be capable of eliminating the invasion of foreign DNA through the CRISPR mechanism (4).

[0209] The large number of high quality draft genome sequences enabled detection not only large genomic variations, but also small but essential genomic alterations. It was previously reported that type II strains showed decreased lipase activity (10). Lipase functions in hydrolyzing triglycerides and releasing free fatty acids, which is thought to be essential in P. acnes virulence. Based on the genome annotation, 13 genes were identified with a potential function of lipase (FIG. 22(A)). Among them, detected insertions/deletions ranging from one nucleotide to 13 nucleotides may explain the decreased lipase activity in type II strains. Two triacylglycerol lipases were encoded in tandem in P. acnes genomes, HMPREF0675-4855 and HMPREF0675-4856 (according to the annotation of SK137). All the type II strains and IB-3 strains had a deletion of the “TATA-box” 20 bp upstream of the start codon of the second lipase gene, HMPREF0675-4856 (FIG. 22(B)). In addition, there was a one-nucleotide deletion at the position of 124G of the second lipase gene, leading to a frameshift and the introduction of a premature stop codon. These two deletions may potentially explain the decreased lipase activity and hence decreased virulence in acne observed in type II strains in previous studies (4, 10).

### Non-Core Genome Regions in the Type III Strain

[0210] Type III strains are rarely found on the skin surface. A type III P. acnes strain isolated from refractory endodontic lesion, HL201 PA1, was sequenced. This first available type 11 genome permitted the identification of the genetic elements specific to this lineage. Compared to type I and type II strains, the genome of HL201 PA1 lacks a few regions with a total length of 43 Kb (FIG. 20). There were 42 ORFs encoded in these regions, including anaerobic dimethyl sulfoxide reductase (PPA0516-PPA0517), iron(III) dicitrate transport system permease (PPA0792-PPA0793), 3-isopropylmalate dehydratase (PPA1361-PPA1363), and maltose transport system permease (PPA1553-PPA1554).

### DISCUSSION

[0211] High-throughput genome sequencing and comparative analysis of a large number of related strains have been used to study the spread and microevolution of several pathogens at the strain level, including methicillin-resistant Staphylococcus aureus (29), Streptococcus pneumoniae (30), and Vibrio cholerae in Haiti outbreak (31), demonstrating the power of comparative genome analysis of multiple strains in improving our understanding of the bacterial pathogens. However, this approach has been rarely applied to study commensal species to understand their varied virulent potentials among different strains and their roles in both health and diseases.

[0212] This study presents a comparative genome analysis of a major skin commensal, P. acnes, based on a large number of sequenced strains. This collection of strains not only includes strains associated with either healthy skin or acne, but also a large number of strain pairs that were isolated from the same individuals. This allowed the comparison of phylogenetic relationships and microevolution of the P. acnes strains associated with health vs. disease as well as of the strains in the same individual microbiome.

[0213] By comparing 82 P. acnes genomes, it was shown that all P. acnes strains had a similar genome size with a similar GC content, encoding 2,577 ORFs on average (Table 2). Although P. acnes has an open pan-genome, unlike many other open-genome species (24), it has limited genome expansion with only a few new genes added per genome (FIGS. 13 and 14). The rate of genome expansion is similar within the major lineages (FIG. 17). There was limited recombination among different P. acnes strains, and thus 16S rRNA ribotypes can be used as a proxy for P. acnes strain identification and classification (FIG. 16). Compared to other typing methods, 16S ribotyping has a much higher resolution than recA typing and is much easier and faster than the traditional MLST method. This method can be applied in a high-throughput manner by combining with next-generation sequencing, and thus allows one to detect the microbiome variations at the strain level (4). This is advantageous and important, as identifying and understanding the strain level variations of the human microbiome is medically important.

[0214] The genomes of the sets of strains isolated from the same individual samples were compared (FIGS. 16 and 19). This collection of genome data is unique and no such kind of study has been performed to investigate the microevolution of a human commensal within an individual microbiome. It was found that while multiple P. acnes strain populations co-existed in the same individual microbiome, clonal expansions occurred in each population with little recombination among different populations. Within each lineage, the strains isolated from the same individuals were significantly more similar to each other than strains from different individuals except the disease associated strains, RT4 and RT5 strains (FIG. 19). Although isolated from different individuals, they appeared to be clonal and have evolved from the same virulent ancestor strain (FIG. 16). This supports the observation that these strains were transmissible (26) and that they may play a role in acne pathogenesis (4). This finding is important and will help control the spread of antibiotic resistant strains and develop new targeted therapy for acne.

[0215] By analyzing the non-core regions, the genomic elements and alterations specific to each lineage were identified (FIG. 20). These lineage-specific elements may render the strains different physiological and functional properties and thus lead to their different roles as a commensal in health or as a pathogen in diseases. Among the acne associated strains, RT4 and RT5 strains encode three distinct loci originated from mobile elements, and RT8 strains encode a distinct region containing a set of NRPS. The virulent genes encoded in these strain-specific regions may explain the associations of these strains with acne and help the development of new drugs targeting against these strains. RT2 and RT6 strains, which were not associated with acne and were enriched in healthy skin, respectively, all encode CRISPR/cas elements. The CRISPR mechanism may prevent these strains from acquiring virulent genes from invading foreign mobile elements. In addition, these strains contain genomic variations in lipases that may alter lipid metabolism and reduce their virulence (FIG. 22).

[0216] In conclusion, by characterizing the genetic landscape and diversity of P. acnes with a large number of genomes, genomic evidence that may explain the diverse phenotypes of P. acnes strains and a new insight into the dual role of this commensal in human skin health and disease is provided. The findings from this comparative genome analysis provide new perspectives on the strain diversity and evolution of commensals in the human microbiome. As many current microbiome studies focus on the associations of microbial communities with health and diseases, this study underscores the importance of understanding the commensal microbiome at the strain level (25). The findings from this study also shed light on new strain-specific therapeutics for acne and other P. acnes associated diseases.

### Materials and Methods

[0217] P. acnes Strains

[0218] Among the 69 P. acnes strains that were sequenced, 67 were isolated from the skin microcomedone samples from acne patients and healthy individuals (4).

[0219] The other two strains, HL201 PA1 and HL202PA1, were isolated from refractory endodontic lesions (23), provided by Dr. David Beighton at the King's College London.

### Whole Genome Shotgun Sequencing, Assembly, and Annotation

[0220] The genome of HL042PA3 was sequenced using Roche/454 FLX and assembled using a combination of PHRAP/CONSED (32) and GSMAPPER (Roche). HL201 PA1 and HL202PA1 were sequenced using Illumina MiSeq (250 bp, paired-end) and assembled using Velvet (33). The remaining 66 genomes were sequenced previously as described (4). Coding sequences were predicted using GeneMark (34) and GLIMMER (35).

### Computation of the Core Regions, Non-Core Regions and the Pan-Genome

[0221] The core regions were defined as genome sequences that were present in all 82 genomes, while the non-core regions were defined as genome sequences that were not present in all the genomes. KPA171202 was used as the reference genome. Each of the other 81 genome sequences (a series of contigs in most of the genomes and ten complete genomes) was mapped to the reference genome using Nucmer (36). All the 81 “.coords” output files of Nucmer program were analyzed to identify overlap regions based on the KPA171202 coordinates using a Perl script. Core sequences were then extracted based on the genome sequence of KPA171202 with the coordinates calculated above.

[0222] The unique regions from each genome were added to the reference genome to make a “revised” reference genome, which contained the original sequence plus the unique genome sequences. This process was repeated for all the genomes until all the unique regions from all genomes were included in the pan-genome.

[0223] Lastly, core regions were subtracted from the pan-genome. The remaining regions were defined as non-core regions, which are not shared by all the strains. Protein coding sequences were predicted by GeneMark.hmm using KPA171202 as a reference file.

### Identification of SNPs in the Core Regions

[0224] Single nucleotide polymorphisms (SNPs) were identified by using “show-snps” utility option of the Nucmer program with the default settings (36). Genome sequence of KPA171202 was used as the reference genome. All the 81 “.snps” output files of Nucmer program were analyzed to identify unique SNP positions based on the KPA171202 coordinates using a Perl script.

### Phylogenetic Tree Construction

[0225] The 82 concatenated sequences of the 123,223 SNP nucleotides in the core region were used to construct a phylogenetic tree of the P. acnes genomes. MEGA5 (37) was used to calculate the distance based on the SNPs in the core regions using the Neighbor-Joining method and the p-distance method. The bootstrap tree inferred from 200 replicates was taken.

### Sequence Type Analysis Based on MLST Schemes

[0226] The sequence types of the 82 isolates were determined based on the MLST schemes published previously (11-13). The MLST gene sequences were aligned using BLAST against all the alleles used in the two MLST schemes.

### Identification of CRISPR/Cas

[0227] CRISPRFinder (38) was used to identify the CRISPR repeat-spacer sequences. The annotation of HL110PA3 was used for BLAST alignment in order to identify the presence of CRISPR/Cas structure and CRISPR repeat-spacer sequences in strains of HL001 PA1, HL060PA1, HL042PA3, HL082PA2, HL103PA1, HL106PA1, HL110PA4, HL202PA1, J139 and ATCC11828. Each spacer sequence was annotated by BLAST (39) against NCBI's non-redundant nucleotide database and the reference genomic sequences database (refseq_genomic).

### Hierarchical Clustering Analysis of the Non-Core Regions

[0228] Among the 1,685 non-core fragments (895,905 bp in total), 314 non-core fragments with a length of >500 bp (747,189 bp in total, corresponding to 83% of all the non-core regions) were extracted and used in hierarchical clustering of the non-core regions. Cluster 3.0 program (40) and average linkage method was used. The clustering matrix was composed of 314 rows and 82 columns, in which 1 denotes presence of the non-core region and 0 denotes absence of the non-core region. Java TreeView program (41) was used to display the clustering result.

### REFERENCES

[0229] 1. Grice E A, Segre J A. 2011. The skin microbiome. Nat Rev Microbiol 9:244-253.
[0230] 2. White G M. 1998. Recent findings in the epidemiologic evidence, classification, and subtypes of acne vulgaris. J Am Acad Dermatol 39:S34-37.
[0231] 3. precedings.nature.com/documents/5305/version/1
[0232] 4. Fitz-Gibbon S T, Tomida S, Chiu B, Nguyen L, Du C, Liu M, Elashoff D, Erfe M C, Loncaric A, Kim J, Modlin R L, Miller J F, Sodergren E, Craft N, Weinstock GM, Li H. Propionibacterium acnes strain populations in the human skin microbiome associated with acne. Journal of Investigative Dermatology (in press).
[0233] 5. Chambers H F, Deleo FR. 2009. Waves of resistance: Staphylococcus aureus in the antibiotic era. Nat Rev Microbiol 7:629-641.
[0234] 6. Chase-Topping M, Gaily D, Low C, Matthews L, Woolhouse M. 2008. Super-shedding and the link between human infection and livestock carriage of Escherichia coli 0157. Nat Rev Microbiol 6:904-912.
[0235] 7. Johnson J L, Cummins C S. 1972. Cell wall composition and deoxyribonucleic acid similarities among the anaerobic coryneforms, classical propionibacteria, and strains of Arachnia propionica. J Bacteriol 109:1047-1066.
[0236] 8. McDowell A, Valanne S, Ramage G, Tunney M M, Glenn J V, McLorinan G C, Bhatia A, Maisonneuve J F, Lodes M, Persing D H, Patrick S. 2005. Propionibacterium acnes types I and II represent phylogenetically distinct groups. J Clin Microbiol 43:326-334.
[0237] 9. Valanne S, McDowell A, Ramage G, Tunney M M, Einarsson G G, O'Hagan S, Wisdom G B, Fairley D, Bhatia A, Maisonneuve J F, Lodes M, Persing D H, Patrick S. 2005. CAMP factor homologues in Propionibacterium acnes: a new protein family differentially expressed by types I and II. Microbiology 151:1369-1379.
[0238] 10. McDowell A, Perry A L, Lambert P A, Patrick S. 2008. A new phylogenetic group of Propionibacterium acnes. J Med Microbiol 57:218-224.
[0239] 11. Lomholt H B, Kilian M. 2010. Population genetic analysis of Propionibacterium acnes identifies a subpopulation and epidemic clones associated with acne. PLoS One 5:e12277.
[0240] 12. McDowell A, Gao A, Barnard E, Fink C, Murray P I, Dowson C G, Nagy I, Lambert P A, Patrick S. 2011. A novel multilocus sequence typing scheme for the opportunistic pathogen Propionibacterium acnes and characterization of type I cell surface-associated antigens. Microbiology 157:1990-2003.
[0241] 13. McDowell A, Barnard E, Nagy I, Gao A, Tomida S, Li H, Eady A, Cove J, Nord CE, Patrick S. 2012. An Expanded Multilocus Sequence Typing Scheme for Propionibacterium acnes: Investigation of ‘Pathogenic’, ‘Commensal’ and Antibiotic Resistant Strains. PLoS One 7:e41480.
[0242] 14. Bruggemann H, Henne A, Hoster F, Liesegang H, Wiezer A, Strittmatter A, Hujer S, Durre P, Gottschalk G. 2004. The complete genome sequence of Propionibacterium acnes, a commensal of human skin. Science 305:671-673.
[0243] 15. The Human Microbiome Project Consortium. 2012. A framework for human microbiome research. Nature 486:215-221.
[0244] 16. The Human Microbiome Project Consortium. 2012. Structure, function and diversity of the healthy human microbiome. Nature 486:207-214.
[0245] 17. Nelson K E, Weinstock G M, Highlander S K, Worley K C, Creasy H H, Wortman J R, Rusch D B, Mitreva M, Sodergren E, Chinwalla A T, Feldgarden M, Gevers D, Haas B J, Madupu R, Ward D V, Birren B W, Gibbs R A, Methe B, Petrosino J F, Strausberg R L, Sutton G G, White O R, Wilson R K, Durkin S, Giglio M G, Gujja S, Howarth C, Kodira C D, Kyrpides N, Mehta T, Muzny D M, Pearson M, Pepin K, Pati A, Qin X, Yandava C, Zeng Q, Zhang L, Berlin A M, Chen L, Hepburn T A, Johnson J, McCorrison J, Miller J, Minx P, Nusbaum C, Russ C, Sykes S M, Tomlinson C M, Young S, Warren W C, Badger J, Crabtree J, Markowitz V M, Orvis J, Cree A, Ferriera S, Fulton L L, Fulton R S, Gillis M, Hemphill L D, Joshi V, Kovar C, Torralba M, Wetterstrand K A, Abouellleil A, Wollam A M, Buhay C J, Ding Y, Dugan S, FitzGerald M G, Holder M, Hostetler J, Clifton S W, Allen-Vercoe E, Earl A M, Farmer C N, Liolios K, Surette M G, Xu Q, Pohl C, Wilczek-Boney K, Zhu D. 2010. A catalog of reference genomes from the human microbiome. Science 328:994-999.
[0246] 18. Brzuszkiewicz E, Weiner J, Wollherr A, Thurmer A, Hupeden J, Lomholt H B, Kilian M, Gottschalk G, Daniel R, Mollenkopf H J, Meyer T F, Bruggemann H. 2011. Comparative genomics and transcriptomics of Propionibacterium acnes. PLoS One 6:e21581.
[0247] 19. Hunyadkurti J, Feltoti Z, Horvath B, Nagymihaly M, Voros A, McDowell A, Patrick S, Urban E, Nagy I. 2011. Complete genome sequence of Propionibacterium acnes type IB strain 6609. J Bacteriol 193:4561-4562.
[0248] 20. Horvath B, Hunyadkurti J, Voros A, Fekete C, Urban E, Kemeny L, Nagy I. 2012. Genome sequence of Propionibacterium acnes type II strain ATCC 11828. J Bacteriol 194:202-203.
[0249] 21. Voros A, Horvath B, Hunyadkurti J, McDowell A, Barnard E, Patrick S, Nagy I. 2012. Complete genome sequences of three Propionibacterium acnes isolates from the type IA(2) cluster. J Bacteriol 194:1621-1622.
[0250] 22. McDowell A, Hunyadkurti J, Horvath B, Voros A, Barnard E, Patrick S, Nagy I. 2012. Draft genome sequence of an antibiotic-resistant Propionibacterium acnes strain, PRP-38, from the novel type IC cluster. J Bacteriol 194:3260-3261.
[0251] 23. Niazi S A, Clarke D, Do T, Gilbert S C, Mannocci F, Beighton D. 2010. Propionibacterium acnes and Staphylococcus epidermidis isolated from refractory endodontic lesions are opportunistic pathogens. J Clin Microbiol 48:3859-3869.
[0252] 24. Tettelin H, Riley D, Cattuto C, Medini D. 2008. Comparative genomics: the bacterial pan-genome. Curr Opin Microbiol 11:472-477.
[0253] 25. Schloissnig S, Arumugam M, Sunagawa S, Mitreva M, Tap J, Zhu A, Waller A, Mende D R, Kultima J R, Martin J, Kota K, Sunyaev S R, Weinstock GM, Bork P. 2013. Genomic variation landscape of the human gut microbiome. Nature 493:45-50.
[0254] 26. Ross J I, Snelling A M, Carnegie E, Coates P, Cunliffe W J, Bettoli V, Tosti G, Katsambas A, Galvan Perez Del Pulgar J I, Rollman O, Torok L, Eady E A, Cove J H. 2003. Antibiotic-resistant acne: lessons from Europe. The British journal of dermatology 148:467-478.
[0255] 27. Jackson A P, Thomas G H, Parkhill J, Thomson N R. 2009. Evolutionary diversification of an ancient gene family (rhs) through C-terminal displacement. BMC Genomics 10:584.
[0256] 28. Horvath P, Barrangou R. 2010. CRISPR/Cas, the immune system of bacteria and archaea. Science 327:167-170.
[0257] 29. Harris SR, Feil E J, Holden M T, Quail M A, Nickerson E K, Chantratita N, Gardete S, Tavares A, Day N, Lindsay J A, Edgeworth J D, de Lencastre H, Parkhill J, Peacock S J, Bentley S D. 2010. Evolution of MRSA during hospital transmission and intercontinental spread. Science 327:469-474.
[0258] 30. Croucher N J, Harris S R, Fraser C, Quail M A, Burton J, van der Linden M, McGee L, von Gottberg A, Song J H, Ko KS, Pichon B, Baker S, Parry C M, Lambertsen L M, Shahinas D, Pillai D R, Mitchell T J, Dougan G, Tomasz A, Klugman K P, Parkhill J, Hanage W P, Bentley S D. 2011. Rapid pneumococcal evolution in response to clinical interventions. Science 331:430-434.
[0259] 31. Chin C S, Sorenson J, Harris J B, Robins W P, Charles R C, Jean-Charles R R, Bullard J, Webster D R, Kasarskis A, Peluso P, Paxinos EE, Yamaichi Y, Calderwood S B, Mekalanos J J, Schadt E E, Waldor M K. 2011. The origin of the Haitian cholera outbreak strain. The New England journal of medicine 364:33-42.
[0260] 32. Gordon D, Abajian C, Green P. 1998. Consed: a graphical tool for sequence finishing. Genome Res 8:195-202.
[0261] 33. Zerbino D R, Birney E. 2008. Velvet: algorithms for de novo short read assembly using de Bruijn graphs. Genome Res 18:821-829.
[0262] 34. Borodovsky M, Mclninch J. 1993. Recognition of genes in DNA sequence with ambiguities. Biosystems 30:161-171.
[0263] 35. Salzberg S L, Delcher A L, Kasif S, White O. 1998. Microbial gene identification using interpolated Markov models. Nucleic Acids Res 26:544-548.
[0264] 36. Kurtz S, Phillippy A, Delcher A L, Smoot M, Shumway M, Antonescu C, Salzberg SL. 2004. Versatile and open software for comparing large genomes. Genome Biol 5:R12.
[0265] 37. Tamura K, Peterson D, Peterson N, Stecher G, Nei M, Kumar S. 2011. MEGA5: molecular evolutionary genetics analysis using maximum likelihood, evolutionary distance, and maximum parsimony methods. Mol Biol Evol 28:2731-2739.
[0266] 38. Grissa I, Vergnaud G, Pourcel C. 2007. CRISPRFinder: a web tool to identify clustered regularly interspaced short palindromic repeats. Nucleic Acids Res 35:W52-57.
[0267] 39. Altschul S F, Gish W, Miller W, Myers E W, Lipman D J. 1990. Basic local alignment search tool. J Mol Biol 215:403-410.
[0268] 40. de Hoon M J, Imoto S, Nolan J, Miyano S. 2004. Open source clustering software. Bioinformatics 20:1453-1454.
[0269] 41. Saldanha A J. 2004. Java Treeview—extensible visualization of microarray data. Bioinformatics 20:3246-3248.

### Example 3—Microbial DNA Extraction from Skin Samples

### Skin Microcomedone Sampling

[0270] Skin microcomedone (white head or black head) samples were taken from the skin of the subjects using a specialized adhesive tape. The skin was moistened with water before the adhesive tape was put on. The tape was left on the skin for 15-20 minutes until it became dry. Clean gloves were used for each sampling. After being taken off from the skin, the tape was placed into a 50 mL sterile tube. This can be applied to many skin sites, such as the nose, forehead, chin, and back.

### Bacterial DNA Extraction

[0271] Microcomedones were individually picked or scraped off from the adhesive tape using sterile forceps and placed in a 2 mL sterile microcentrifuge tube filled with Buffer ATL (Qiagen) and 0.1 mm diameter glass beads (BioSpec Products, Inc., Bartlesville, OK). Cells were lysed using a beadbeater for 3 minutes at 4,800 rpm at room temperature. After centrifugation at 14,000 rpm for 5 minutes, the supernatant was retrieved and used for genomic DNA extraction using QIAamp DNA Micro Kit (Qiagen). The manufacturer protocol for extracting DNA from chewing gum was used. Concentration of the genomic DNA was determined by a spectrometer.

### Example 4—Microbiome Type Detection

[0272] Detailed Protocol for Accurate Detection of the Skin Microbiome Type Based on 16S rDNA

### PCR Amplification, Cloning, and Sequencing

[0273] 16S rDNA was amplified using primers 8F (5′-AGAGTTTGATYMTGGCTCAG-3′ (SEQ ID NO: 468)) and 1510R (5′-TACGGYTACCTTGTTACGACTT-3′ (SEQ ID NO: 469)). Thermocycling conditions were as following: initial denaturation step of 5 minutes at 94° C., 30 cycles of denaturation at 94° C. for 45 seconds, annealing at 52° C. for 30 seconds and elongation at 72° C. for 90 seconds, and a final elongation step at 72° C. for 20 minutes. PCR products were purified using column-based method. Subsequently, the 16S rDNA amplicons were cloned into pCR 2.1-TOPO vector (Invitrogen). One-Shot TOP-10 Chemically Competent E. coli cells (Invitrogen) were transformed with the vectors and plated on selective media.

[0274] Individual positive colonies were picked and inoculated into selective LB liquid medium. After 14 hours of incubation, the plasmids were extracted and purified, either using column-based plasmid extraction kit or traditional methods. The clones were sequenced bidirectionally using Sanger sequencing method. The microbiome type of each individual was determined based on the 16S rDNA sequence data of the top 10 major ribotypes. See FIG. 5 and SEQ ID NOs 1-10.

Detailed Protocols for Fast Detection of the Skin Microbiome Type Based on PCR and qPCR

[0275] By sequencing and annotating 69 novel P. acnes genomes and by comparing a total of 82 P. acnes genomes, several genomic loci which are unique to acne associated P. acnes strains were identified, i.e., Loci 1-4. See FIG. 8. The genomic sequences of Loci 1, 2, 3, and 4 from all sequences P. acnes strains and their sequence similarities, which range from 95% to 100%, are listed as SEQ ID NOs 15-18, respectively.

### Detection Method 1

[0276] To rapidly detect the presence or absence of RT4 and RT5 strains in patients, multiplex PCR targeting Loci 1, 2, and 3 was designed and performed on genomic DNA extracted from P. acnes strains and skin samples. FIG. 23 shows that Loci 1, 2, and 3 were amplified from various P. acnes strains as predicted based on the genome data.

[0277] The PCR primer sequences are shown in Table 6:

TABLE 6
Primers specific for loci 1, 2, 3 and Pak (housekeeping gene)

| Target | | |
|---|---|---|
| locus | Forward primer | Reverse primer |
| Locus 1 | GGTATCCACCGAGATGGAAG | GTGGTCCCAGGTGACATTCT |
| | (SEQ ID NO: 11) | (SEQ ID NO: 12) |
| Locus 2 | CGACATCGACGTTTCATCTG | GTGTTCTCCTCGTGCTGGTT |
| | (SEQ ID NO: 13) | (SEQ ID NO: 14) |
| Locus 3 | GATAATCCGTTCGACAAGCTG | ACCCACCACGATGATGTTT |
| | (SEQ ID NO: 15) | (SEQ ID NO: 16) |
| Pak | CGACGCCTCCAATAACTTCC | GTCGGCCTCCTCAGCATC |

Additional primers targeting these loci can be designed based on the genome sequences of loci 1-4 (SEQ ID NOs 15-18, respectively). Each 20 μL reaction contains 12.7 μL molecular grade H2O, 2 μL 10× High Fidelity Buffer, 0.6 μL 50 mM MgSO4, 0.4 μL 10 nM dNTP, 0.8 μL of each primer (final primer concentrations is 400 nM), 0.1 μL Platinum Taq DNA Polymerase High Fidelity (All reagents from Invitrogen) and 1 μL gDNA template (approx. 40ng gDNA). The thermocycling conditions are as following: initial denaturation step of 10 minutes at 95° C.; 35 cycles with each consisting of 45 seconds at 95° C., 30 seconds at 65° C. and 45 seconds at 72° C.; and final elongation step of 10 minutes at 72° C.

[0278] To quantitatively measure the abundance of acne associated P. acnes strains in skin samples, quantitative PCR (qPCR) targeting Loci 1, 2, and 3 were performed on genomic DNA extracted from P. acnes strains. See FIG. 12. LightCyler 480 High Resolution Melting Master kit was used (Roche Diagnostics GmbH, Mannheim, Germany). Each 10 μL reaction contains 5 μL of Master Mix (2× concentrate), 1 μL of 25 mM MgCl2, 0.5 μL of 4 μM forward and reverse primers, 1 μL to 3.5 μL of DNA template (approximately 2.5ng DNA), and molecular grade H2O, up to the volume. The thermocycling conditions were as following: initial activation step of 10 minutes at 95° C.; 40 amplification cycles with each consisting of 10 seconds at 95° C., 15 seconds at 65° C. during first cycle, but with a stepwise 0.5° C. decrease for each succeeding cycle and 30 seconds at 72° C.; and finally, a melting curve step, starting at 65° C. and ending at

[0279] 99° C., with ramp rate of 0.02° C./s and acquisition rate of 25 per ° C.

[0280] The protocol was tested using mock samples, where different strains of P. acnes were mixed in different proportions to mimic the strain population distributions in real samples. See Table 7.

TABLE 7
Mock samples mimicking the microbiome types observed
in human skin samples

| | Micro- | Domi- | Percentage | Abundance | Abundance |
|---|---|---|---|---|---|
| Mock | biome | nant | of dominant | of | of |
| sample | type | isolate | isolate | Locus 1 | Locus 2 |
| 1A | I | HL036PA3 | 80 | 7.5% | 7.5% |
| 1B | I | HL078PA1 | 80 | 7.5% | 87.5% |
| 1C | I | HL106PA2 | 80 | 87.5% | 87.5% |
| 2 | II | HL103PA1 | 80 | 8.0% | 10.0% |
| 3 | III | HL087PA3 | 80 | 8.0% | 10.0% |
| 4 | IV | HL038PA1 | 70 | 79.0% | 82.0% |
| 5A | V | HL072PA2 | 80 | 6.7% | 8.9% |
| 5B | V | HL096PA1 | 80 | 86.7% | 88.9% |
| 6 | minor | HL110PA4 | 70 | 12.0% | 15.0% |
| 8A | minor | HL086PA1 | 70 | 80.0% | 83.3% |
| 8B | minor | HL092PA1 | 70 | 10.0% | 13.3% |

[0281] The concentration of each locus was quantified from standards derived from Locus 1, Locus 2, and Pak PCR amplicons. The copy number of each gene was quantified from genomic DNA standards that were derived from TadA (in Locus 3) and Pak amplicons using conventional PCR. See FIG. 24.

### Detection Method 2

[0282] P. acnes TaqMan qPCR Assay

### Primer and Probe Design

[0283] Primers and probes for detecting Loci 1, 2, 3, and 4 in P. acnes strains and clinical samples were designed as listed in Table 8:

TABLE 8
Primer and probe sequences used for identification of P. acnes loci

| | | Primer/ | | |
|---|---|---|---|---|
| Targeted | Primer/ | Probe | | Amplicon |
| region | Probe | name | Sequence (5′-3′) | size (bp) |
| Locus1 | forward | Locus1_F | GAAGAATCCCGCTCCATTTCC | 107 |
| | primer | | (SEQ ID NO: 17) | |
| | reverse | Locus1_R | CCTTTCTTGTAGCCGAGCAG | |
| | primer | | (SEQ ID NO: 18) | |
| | probe | Locus1_Probe | 56-FAM/ATTGTCACC/ZEN/ | |
| | | | TGGGACCACCGTAAAC/31ABkFQ | |
| | | | (SEQ ID NO: 19) | |
| Locus2 | forward | Locus2_F | CGTGATCCTGATCGACTGTG | 103 |
| | primer | | (SEQ ID NO: 20) | |
| | reverse | Locus2_R | GCTCCACAACTTCGAGTGC | |
| | primer | | (SEQ ID NO: 21) | |
| | probe | Locus2_Probe | CAGGCCGTTGATCGTGAGCTGA | |
| | | | (SEQ ID NO: 22) | |
| Locus3 | forward | Locus3_F | TGCTGATAATCCGTTCGACA | 104 |
| | primer | | (SEQ ID NO: 23) | |
| | reverse | Locus3_R | ACGACGTCGAAAACAACTCC | |
| | primer | | (SEQ ID NO: 24) | |
| | probe | Locus3_Probe | 5TET/CTCTACCGA/ZEN/ | |
| | | | AGCTCTTGCCGCAT/3IABkFQ | |
| | | | (SEQ ID NO: 25) | |
| Locus4 | forward | Locus4_F | ATCGCCGTCGACAGGTAGT | 103 |
| | primer | | (SEQ ID NO: 26) | |
| | reverse | Locus4_R | CCGAGATTCTGCGCCTAGT | |
| | primer | | (SEQ ID NO: 27) | |
| | probe | Locus4_Probe | CGGTGCCCTTGCTGAGGTACA | |
| | | | (SEQ ID NO: 28) | |
| Pak | forward | Pak_F | GCAACCCGACATCCTCATTA | 101 |
| | primer | | | |
| | reverse | Pak_R | AGTCGAAGAAGTCGCTCAGG | |
| | primer | | | |
| | probe | Pak_Probe | VIC/CGTTCTACAGCCACCACGACGG/ | |
| | | | TAMRA | |

### Locus 1, Locus 3, and Pak Amplification

[0284] Benchtop amplification was carried out to assess specificity of designed primers and to determine optimum cycling conditions prior to multiplexing.

[0285] Amplification was carried out using a BioRad C1000 thermal cycler. Singleplex PCR reactions contained 0.2 μM target specific primers, 10× Platinum Taq buffer (Invitrogen), 1.0 mM MgCl2, 0.2 mM each dNPT, 0.5U/μl Platinum Taq polymerase, 1 μl DNA template and made up to a final volume of 10 μl. Cycling was as follows: initial denaturation 94° C. for 5 minutes, followed by 30 cycles of denaturation at 94° C. for 30 seconds, annealing at 60° C. for 30 seconds and extension at 72° C. for 30 seconds, and one final extension cycle at 72° C. for 5 minutes. Amplification products were analysed electrophoretically on a 1% agarose/TBE gel to check for correct amplification of target and cross-species reactivity with primer targets.

### Taqman Triplex PCR

[0286] Triplex qPCR was carried out using an Applied Biosystems 7900HT instrument. 1-2 μl of sample DNA were added to mastermix containing X2 QuantiTect Multiplex PCR Master Mix (Qiagen), 0.2 μM primers; Locus1_F, Locus1_R, Pak_F, Pak_R; 0.2 μM probes; Locus1_Probe and Pak_Probe, and 0.1 μM primers Locus3_F and Locus3_R, and 0.1 μM Locus3_Probe. The reaction mix was made up to a final volume of 20 μl with sterile PCR grade water. The PCR program consisted of one cycle at 50° C. for 2 minutes, followed by one cycle at 95° C. for 15 minutes to allow for activation of the multiplex mastermix, then 45 cycles of 94° C. for 60 seconds and 57° C. for 90 seconds. Each run contained calibrators of extracted P. acnes DNA from culture, as well as no-template controls (NTC) and water controls. qPCR was run with a passive reference, ROX, supplied in the Quantitect Multiplex PCR mastermix. Data were analysed using the SDS v2.4 software.

### Assay Calibration, Sensitivity, and Specificity

[0287] Calibrations curves for P. acnes targets Locus 1 and Pak were constructed by plotting mean Ct values for a series of log dilutions of quantified genomic DNA standards extracted from P. acnes from pure culture. Genome equivalents were estimated. Five replicates of P. acnes calibrators were used to calculate mean Ct values and standard deviations. These data were used to determine sensitivity of the assay and the limits of detection (LOD). Calibration plots were used to determine the number of P. acnes genomes in clinical samples, with one copy of Locus1 and Pak targets per genome. DNA concentration and copy number were determined and serial ten-fold dilutions of the purified product were used as standards for construction of the Locus3 calibration plot. Strains that display possible combinations of the presence and absence of Locus1 and Locus 3 were used for Locus1 and Pak calibration: HL038PA1 (Locus1+, Locus3+), HL083PA1 (Locus1+, Locus3−), HL078PA1 (Locus1−, Locus3+) and HL063PA1 (Locus1−, Locus3−). The assay was validated using sequenced P. acnes strains from pure culture with known loci before being applied to clinical samples. The specificity of the assay for each target was tested using other bacterial species including skin commensals and other Propionibacteria.

### Assay Validation

[0288] A total of 24 sequenced P. acnes strains (HL063PA1, HL078PA1, HL083PA1, HL038PA1, HL037PA1, HL082PA1, HL020PA1, HL001PA1, HL046PA2, HL043PA1, HL086PA1, HL110PA3, HL110PA4, HL007PA1, HL087PA3, HL027PA1, HL056PA1, HL067PA1, HL074PA1, HL045PA1, HL053PA1, HL005PA1, HL072PA1, HL043PA2) including possible combinations with and without Locus 1 and Locus 3 were used to validate the triplex qPCR assays. The qPCR triplex assay successfully identified Locus 1 and Locus 3 in strains previously shown by whole genome sequencing to harbor these loci.

### Application to Clinical Samples

[0289] Genomic DNA extracted from two clinical samples, #1 and #2, were analyzed using the Taqman qPCR triplex assay. Amplification plots revealed the presence of P. acnes (Pak) in both samples (FIG. 6). Locus1 and Locus 3 targets were also detected in both samples with a much larger percentage of P. acnes Locus1 positive and Locus3 positive strains present in 1 μl of sample #1 compared to sample #2.

### Example 5—Acne Vaccine

[0290] Strains with 16S rDNA ribotypes (RTs) 4, 5, 7, 8, 9, and 10 were identified as highly associated with acne. Vaccines can be raised against these strains. See T. Nakatsuji et al., 128(10) J. Invest. Dermatol. 2451-2457 (Oct. 2008).

### Example 6—Probiotic Development Utilizing the Strains Associated with Healthy Skin in Topical Creams, Solutions, and the Like for Cosmetic and Other Products

[0291] RT6 is mostly found in healthy skin. These strains can be used as probiotics in topical products for acne prevention and treatment. Four RT6 strains, including HL110PA3, HL110PA4, HL042PA3, and HL202PA1, were isolated and sequenced.

[0292] In addition, bacterial culture supernatant and/or cell lysate, including bacterial metabolites, can be used in creams, solutions, and other cosmetic products to prevent the growth of strains associated with acne. Sequences sharing at least 95% homology with SEQ ID NOs 51-54 may be used for the development of probiotics and the like.

### Example 7—Drug Development Targeting Specific Strains that are Associated with Acne

[0293] Identification of the Core and Non-Core Regions of P. acnes The “core” genome regions of P. acnes were defined as genome sequences that are present in all of the 82 genomes, while the “non-core” regions were defined as genome sequences that are NOT present in all the genomes. See S. Tomida et aL., Pan-genome and Comparative Genome Analyses of Propionibacterium acnes Reveal Its Genomic Diversity in the Healthy and Diseased Human Skin Microbiome (in press); see also Example 2. Non-core regions specific to strains of RTs 4 and 5, e.g., loci 1, 2, and 3, were identified, as mentioned previously. Non-core regions specific to strains of RT8 (noted as Locus 4) were also identified as well as several other strains such as HL078PA1, HL030PA2, HL063PA2, P.acn17, HL097PA1, and PRP38. See FIG. 20. The genomic sequence of Locus 4 is set forth as SEQ ID NO:18. The genes in loci 1-4 below (Tables 9, 10, and 11) that are mostly unique to acne associated strains RT4, RT5, and RT8 are listed below. Non-core sequences are also set forth. The genes encoded in these loci are drug targets.

TABLE 9
List of genes encoded in loci 1 and 2, specific to RT4 and 5

| Locus in FIG. 3a | ID | Description |
|---|---|---|
| Locus 1 | GM131 | ABC transporter ATP-binding protein |
| Locus 1 | GM132/ | Site-specific recombinase |
| | GM133*² | |
| Locus 1 | GM134 | Site-specific recombinase |
| Locus 1 | GM135 | Hypothetical protein |
| Locus 1 | GM136 | Hypothetical protein |
| Locus 1 | GM137 | N-acetylmuramoyl-L-alanine amidase |
| Locus 2 | GM171 | Hypothetical protein |
| Locus 2 | GM172 | Hypothetical protein |
| Locus 2 | GM173 | Single-strand binding family protein |
| Locus 2 | GM174 | CobQ/CobB/MinD/ParA |
| | | nucleotide binding domain protein |
| Locus 2 | GM175 | Hypothetical protein |
| Locus 2 | GM176 | Hypothetical protein |
| Locus 2 | GM177 | Hypothetical protein |
| Locus 2 | GM178 | Hypothetical protein |
| Locus 2 | GM179 | Hypothetical protein |
| Locus 2 | GM180 | Hypothetical protein |
| Locus 2 | GM181 | CAAX amino protease family protein |
| Locus 2 | GM182 | Hypothetical protein |
| Locus 2 | GM183 | YcaO-like protein |
| Locus 2 | GM184 | Hypothetical protein |
| Locus 2 | GM185 | SagB-type dehydrogenase |
| | | domain protein |
| Locus 2 | GM186 | Hypothetical protein |
| Locus 2 | GM187 | ABC transporter, ATP-binding protein |
| Locus 2 | GM188 | ABC-2 type transporter |
| Locus 2 | GM189 | Hypothetical protein |
| Locus 2 | GM196 | Hypothetical protein |

TABLE 10
List of genes encoded in Locus 3,
a linear plasmid and specific to RT4 and 5

| Locus | ID | Description |
|---|---|---|
| Locus 3 | PAGK_2319 | hypothetical protein |
| Locus 3 | PAGK_2320 | hypothetical protein |
| Locus 3 | PAGK_2321 | hypothetical protein |
| Locus 3 | PAGK_2322 | plasmid stabilization system protein |
| Locus 3 | PAGK_2323 | hypothetical protein |
| Locus 3 | PAGK_2324 | hypothetical protein |
| Locus 3 | PAGK_2325 | hypothetical protein |
| Locus 3 | PAGK_2326 | CobQ/CobB/MinD/ParA |
| | | nucleotide binding domain |
| Locus 3 | PAGK_2327 | hypothetical protein |
| Locus 3 | PAGK_2328 | hypothetical protein |
| Locus 3 | PAGK_2329 | hypothetical protein |
| Locus 3 | PAGK_2330 | hypothetical protein |
| Locus 3 | PAGK_2331 | hypothetical protein |
| | | (similar to PPA1279) |
| Locus 3 | PAGK_2332 | plasmid partition protein ParA |
| Locus 3 | PAGK_2333 | hypothetical protein |
| Locus 3 | PAGK_2334 | hypothetical protein |
| Locus 3 | PAGK_2335 | hypothetical protein |
| Locus 3 | PAGK_2336 | putatove ribbon-helix-helix protein, |
| | | copG family |
| Locus 3 | PAGK_2337 | putative ribonuclease E |
| Locus 3 | PAGK_2338 | hypothetical protein (similar to PPA1294) |
| Locus 3 | PAGK_2339 | hypothetical protein (similar to PPA1295) |
| Locus 3 | PAGK_2340 | putative permease |
| Locus 3 | PAGK_2341 | hypothetical protein (similar to PPA1297) |
| Locus 3 | PAGK_2342 | hypothetical protein (similar to PPA1298) |
| Locus 3 | PAGK_2343 | hypothetical protein (similar to PPA1299) |
| Locus 3 | PAGK_2344 | hypothetical protein |
| | | (similar to CLOLEP_00122) |
| Locus 3 | PAGK_2345 | hypothetical protein |
| | | (similar to CLOLEP_00123) |
| Locus 3 | PAGK_2346 | hypothetical protein |
| | | (similar to CLOLEP_00124) |
| Locus 3 | PAGK_2347 | hypothetical protein |
| | | (similar to CLOLEP_00125) |
| Locus 3 | PAGK_2348 | hypothetical protein |
| | | (similar to CLOLEP_00126) |
| Locus 3 | PAGK_2349 | hypothetical protein |
| | | (similar to CLOLEP_00127) |
| Locus 3 | PAGK_2350 | hypothetical protein |
| Locus 3 | PAGK_2351 | hypothetical protein |
| | | (similar to CLOLEP_00129) |
| Locus 3 | PAGK_2352 | hypothetical protein |
| | | (similar to CLOLEP_00130) |
| Locus 3 | PAGK_2353 | hypothetical protein |
| | | (similar to CLOLEP_00131) |
| Locus 3 | PAGK_2354 | hypothetical protein |
| | | (similar to CLOLEP_00132) |
| Locus 3 | PAGK_2355 | hypothetical protein |
| | | (similar to CLOLEP_00134) |
| Locus 3 | PAGK_2356 | hypothetical protein |
| | | (similar to CLOLEP_00135) |
| Locus 3 | PAGK_2357 | hypothetical protein |
| | | (similar to CLOLEP_00141) |
| Locus 3 | PAGK_2358 | hypothetical protein |
| | | (similar to CLOLEP_00142) |
| Locus 3 | PAGK_2359 | hypothetical protein |
| | | (similar to CLOLEP_00143) |
| Locus 3 | PAGK_2360 | hypothetical protein |
| | | (similar to CLOLEP_00144, RcpC) |
| Locus 3 | PAGK_2361 | hypothetical protein |
| | | (similar to CLOLEP_00145, TadZ) |
| Locus 3 | PAGK_2362 | hypothetical protein |
| | | (similar to CLOLEP_00146, TadA) |
| Locus 3 | PAGK_2363 | hypothetical protein |
| | | (similar to CLOLEP_00147, TadB) |
| Locus 3 | PAGK_2364 | hypothetical protein |
| | | (similar to CLOLEP_00148, TadC) |
| Locus 3 | PAGK_2365 | hypothetical protein |
| | | (similar to CLOLEP_00149, Flp-1) |
| Locus 3 | PAGK_2366 | hypothetical protein |
| | | (similar to CLOLEP_00151, TadE) |
| Locus 3 | PAGK_2367 | hypothetical protein |
| | | (similar to CLOLEP_00152, TadE) |
| Locus 3 | PAGK_2368 | hypothetical protein |
| | | (similar to CLOLEP_00153, TadE) |
| Locus 3 | PAGK_2369 | hypothetical protein |
| | | (similar to CLOLEP_00154) |
| Locus 3 | PAGK_2370 | hypothetical protein |
| | | (similar to CLOLEP_00157) |
| Locus 3 | PAGK_2371 | hypothetical protein |
| | | (similar to CLOLEP_00158) |
| Locus 3 | PAGK_2372 | hypothetical protein |
| | | (similar to CLOLEP_00159) |
| Locus 3 | PAGK_2373 | hypothetical protein |
| | | (similar to CLOLEP_00160) |
| Locus 3 | PAGK_2374 | hypothetical protein |
| Locus 3 | PAGK_2375 | hypothetical protein |
| | | (similar to CLOLEP_00162) |
| Locus 3 | PAGK_2376 | hypothetical protein |
| | | (similar to CLOLEP_00163) |
| Locus 3 | PAGK_2377 | hypothetical protein |
| | | (similar to CLOLEP_00164) |
| Locus 3 | PAGK_2378 | hypothetical protein |
| | | (similar to CLOLEP_00166) |
| Locus 3 | PAGK_2379 | repA |
| Locus 3 | PAGK_2380 | CobQ/CobB/MinD/ParA nucleotide |
| | | binding domain |
| Locus 3 | PAGK_2381 | hypothetical protein |
| Locus 3 | PAGK_2382 | hypothetical protein |
| Locus 3 | PAGK_2383 | Yag1E |
| Locus 3 | PAGK_2384 | hypothetical protein |
| Locus 3 | PAGK_2385 | hypothetical protein |
| Locus 3 | PAGK_2386 | hypothetical protein |
| Locus 3 | PAGK_2387 | hypothetical protein |
| Locus 3 | PAGK_2388 | hypothetical protein |
| Locus 3 | PAGK_2389 | hypothetical protein |
| Locus 3 | PAGK_2390 | hypothetical protein |
| Locus 3 | PAGK_2391 | hypothetical protein |
| Locus 3 | PAGK_2392 | ResA |

TABLE 11
List of genes encoded in Locus 4, RT8 specific region

| Locus | ID | Description |
|---|---|---|
| Locus 4 | HMPREF9576_00292 | tRNA adenylyltransferase |
| Locus 4 | HMPREF9576_00293 | conserved hypothetical protein |
| Locus 4 | HMPREF9576_00294 | conserved domain protein |
| Locus 4 | HMPREF9576_00295 | response regulator receiver domain |
| | | protein |
| Locus 4 | HMPREF9576_00296 | histidine kinase |
| Locus 4 | HMPREF9576_00297 | hypothetical protein |
| Locus 4 | HMPREF9576_00298 | hypothetical protein |
| Locus 4 | HMPREF9576_00299 | hypothetical protein |
| Locus 4 | HMPREF9576_00300 | hypothetical protein |
| Locus 4 | HMPREF9576_00301 | hypothetical protein |
| Locus 4 | HMPREF9576_00302 | drug resistance MFS transporter, |
| | | drug:H+ antiporter-2 (14 Spanner) |
| | | (DH42) family protein |
| Locus 4 | HMPREF9576_00303 | hypothetical protein |
| Locus 4 | HMPREF9576_00304 | conserved domain protein |
| Locus 4 | HMPREF9576_00305 | beta-ketoacyl synthase, N-terminal |
| | | domain protein |
| Locus 4 | HMPREF9576_00306 | hypothetical protein |
| Locus 4 | HMPREF9576_00307 | acetyltransferase, GNAT family |
| Locus 4 | HMPREF9576_00308 | putative (3R)-hydroxymyristoyl- |
| | | ACP dehydratase |
| Locus 4 | HMPREF9576_00309 | putative acyl carrier protein |
| Locus 4 | HMPREF9576_00310 | putative 3-ketoacyl-(acyl-carrier- |
| | | protein) reductase |
| Locus 4 | HMPREF9576_00311 | ornithine cyclodeaminase/mu- |
| | | crystallin family protein |
| Locus 4 | HMPREF9576_00312 | pyridoxal-phosphate dependent enzyme |
| Locus 4 | HMPREF9576_00313 | lantibiotic dehydratase, C-terminus |
| Locus 4 | HMPREF9576_00314 | aminotransferase, class VII |
| Locus 4 | HMPREF9576_00315 | acyl carrier domain protein |
| Locus 4 | HMPREF9576_00316 | AMP-binding enzyme |
| Locus 4 | HMPREF9576_00317 | malonyl CoA-acyl carrier protein |
| | | transacylase family protein |
| Locus 4 | HMPREF9576_00318 | ABC-2 type transporter |
| Locus 4 | HMPREF9576_00319 | ABC transporter, ATP-binding protein |
| Locus 4 | HMPREF9576_00320 | hypothetical protein |

### Example 8—Targeted Phage Therapy

[0294] Bacteriophages play an important role in regulating the composition and dynamics of microbial communities, including the human skin microbiota. Bacteriophages of Propionibacterium acnes, a major skin commensal, were previously isolated and used as a typing system to distinguish different serotypes of P. acnes. However, molecular characterization of these phages had been lacking. Recent efforts in genome sequencing have improved our understanding of P. acnes phages and their interactions with bacterial hosts.

[0295] Bacteriophages are the most abundant organisms on earth (Mc Grath & van Sinderen, 2007) and are believed to outnumber bacteria by 10:1 in many diverse ecosystems (Rohwer, 2003). As important components of microbial communities, bacteriophages are a reservoir of diversity-generating elements (Rohwer & Thurber, 2009) and regulate both the abundances (Suttle, Chan, & Cottrell, 1990) and diversity of microbial hosts by predation (Rodriguez-Valera et aL., 2009). The human skin is inhabited by hundreds of microbial species, including bacteria, fungi, and viruses (Grice & Segre, 2011). The homeostasis of this ecosystem is important to its function as a barrier against the invasion and colonization of pathogens on the skin. However, much remains to be learned about the nature and driving forces of the dynamics among the microorganisms in the skin microbial community. In particular, the relative abundances and interactions between bacteriophages and their bacterial hosts on the skin remained to be elucidated.

[0296] The microbial community in the pilosebaceous unit of the skin is dominated by Propionibacterium acnes, which accounts for approximately 90% of the microbiota (“(Nature Precedings Paper),” n.d.). P. acnes has been suggested as a pathogenic factor in the development of acne vulgaris (Bojar & Holland, 2004; Leyden, 2001), one of the most common human skin diseases. Above-detailed studies classified P. acnes strains into ribotypes (RT) based on their 16S ribosomal RNA (rRNA) sequences, and demonstrated that P. acnes strain population structure in pilosebaceous units differs between healthy skin and acne affected skin.

[0297] P. acnes bacteriophages exist on the human skin. In 1968, Zierdt et aL. (Zierdt,Webster, & Rude, 1968) isolated such a phage, named phage 174, from spontaneous plaques of a P. acnes isolate (at the time known as Corynebacterium acnes). Phage 174 was able to lyse nearly all P. acnes strains tested in the study [10]. Subsequently, more P. acnes phages were isolated which exhibited varied life cycles that range from lytic to temperate [11, 12]. However, in the last decades, the study of P. acnes bacteriophages had been limited to the development of phage typing systems to distinguish the different serotypes of P. acnes [13, 14]_ENREF_4, and extensive molecular characterization of the phages has been lacking.

[0298] Recent genomic sequencing of P. acnes bacteriophages (Farrar et aL., 2007; Lood & Collin, 2011; Marinelli et aL., 2012) have provided new insight into P. acnes phage diversity. P. acnes phages are similar to mycobacteriophages both morphologically and genetically, but have a much smaller genome. Currently 14 phage genome sequences are available. Sequencing additional phage isolates is needed to further characterize the diversity. Despite these recent sequencing efforts, the genome-level diversity of P. acnes phages in the human skin microbiome and their interactions with P. acnes and other Propionibacteria remain to be elucidated. P. acnes phages have diverse host specificities among different lineages of P. acnes strains [14]. Phage host specificity is important in determining how these phages regulate the composition and dynamics of P. acnes populations in the community. On the other hand, certain P. acnes strains may also influence phage populations through their anti-viral mechanisms, such as the bacterial immune system based on the transcription of clustered, regularly-interspaced short, palindromic repeat (CRISPR) sequence arrays. The CRISPR arrays contain oligonucleotide ‘spacers’ derived from phage DNA or plasmid DNA. In a manner analogous to RNA interference, the transcribed, single-stranded CRISPR RNA elements interact with CRISPR-associated (Cas) proteins to direct the degradation of DNA targets containing complementary ‘protospacer’ sequences from foreign DNA [16]. While characterizing the genome diversity of P. acnes, Applicants discovered that P. acnes strains of RT2 and RT6 harbor CRISPR arrays. The CRISPR mechanism may play a role in defending against phage or plasmid invasion.

[0299] To better understand the interactions between bacteria and bacteriophages in the human skin microbiome and their contributions to skin health and disease, the diversity and host specificity of P. acnes phages isolated from acne patients and healthy individuals was investigated. The genomes of 15 phage isolates were investigated and screened against a panel of 69 sequenced Propionibacteria strains to determine their host range and specificity.

### Phage Isolation and General Genome Features

[0300] To characterize the genetic diversity and the abundance of P. acnes phages in the skin microbiome, 203 skin samples of pilosebaceous units from 179 individuals were collected, including 109 samples from normal individuals and 94 from acne patients. All of the samples were cultured for P. acnes under anaerobic conditions. Phage plaques in 49 samples were observed: 35 from normal individuals and 14 from acne patients. P. acnes phages were found more frequently in samples from normal individuals than from acne patients with statistical significance (p=0.005, Fisher's exact test). Among the 93 phage isolates that were obtained from these samples, five phages from acne patients and ten from normal individuals were selected for whole genome sequencing using 454 or Illumina platforms (Table 12).

TABLE 12
Phage Genome Information and Sequencing Statistics

| | Genome | | Total | | | | Presence of |
|---|---|---|---|---|---|---|---|
| | Length | | Input | Total Input | | Annotated | 11-nt |
| Phage Name | (bp) | GC % | Reads | Bases | Coverage | ORFs | Overhang |
| PHL111M01 | 29,140 | 54.33 | 5,453 | 2,865,116 | 98x | 46 | yes |
| PHL060L00 | 29,514 | 64.05 | 10,000 | 12,015,904 | 407x | 47 | yes |
| PHL112N00 | 29,266 | 54.45 | 10,000 | 12,270,460 | 419x | 47 | yes |
| PHL113M01 | 29,200 | 54.10 | 4,228 | 2,237,790 | 77x | 45 | yes |
| PHL114L00 | 29,464 | 54.21 | 10,000 | 12,270,600 | 416x | 47 | yes |
| PHL010M04 | 29,511 | 53.99 | 3,185 | 1,686,535 | 57x | 46 | not verified |
| PHL066M04 | 29,512 | 53.99 | 4,478 | 2,364,379 | 80x | 46 | yes |
| PHL073M02 | 29,503 | 53.99 | 4,700 | 2,529,669 | 86x | 46 | not verified |
| PHL071N05 | 29,467 | 53.92 | 6,143 | 3,059,098 | 104x | 46 | not verified |
| PHL057M10 | 29,377 | 54.26 | 4,456 | 2,313,471 | 79x | 46 | yes |
| PHL115M02 | 29,453 | 63.82 | 5,914 | 4,687,391 | 169x | 46 | yes |
| PHL085M01 | 29,451 | 63.82 | 10,000 | 12,552,610 | 426x | 46 | yes |
| PHL037M02 | 29,443 | 62.78 | 5,895 | 3,093,818 | 106x | 46 | yes |
| PHL085N00* | 29,454 | 53.83 | 20,000 | 3,904,239 | 133 | 45 | yes |
| PHL082M00* | 29,491 | 54.38 | 20,000 | 3,289,741 | 112 | 44 | yes |
| Average | 29,383 | 54.05 | 6,729 | 5,688,219 | 193.37 | 46 | |

*sequenced on the IIlumina MiSeq platform. All other genomes were sequenced on the 454 platform

[0301] All phage genomes were assembled, completed, and annotated (FIG. 29). The genomes of these 15 phages have comparable sizes (29.1-29.5 Kb) and GC content (53.8-54.5%), similar to the published P. acne phage genomes. On average, 44 open reading frames (ORFs) were predicted in each genome. Consistent with the genome organization previously reported [11, 15], the ORFs were arranged compactly within the left and right arm regions of each genome. The left arm and right arm of the genomes can be distinguished by their opposite directions of transcription. The sequence identity between any pair of genomes is moderately high, ranging from 78.2 to 99.9% (Table 12).

P. acnes Phages are Diverse with Subgroups of Highly Related Strains with Distinct Sites of Genetic Variations

[0302] To investigate the genome diversity of P. acnes phages, all 29 sequenced phage genomes were compared, including Applicants' 15 phage genomes and the 14 published ones (Farrar et aL., 2007; Lood & Collin, 2011; Marinelli et aL., 2012). The core genomic regions shared by all 29 genomes have a combined length of 24,475 bp (83% of the average genome length) and contain 6,812 single-nucleotide polymorphisms (SNPs). A phylogenetic tree constructed from these 6,812 SNPs (FIG. 30) shows that most of the phage genomes isolated from all studies to date show comparable divergence from each other with an average distance of 0.301 (substitution rate at the SNP sites). However, also found were two groups of phages, named as Group I and Group II (FIG. 30), that are closely related with much shorter phylogenetic distances. The same results were obtained when the entire genome sequences (including core and non-core regions) were used in the calculation of phylogenetic relationships (FIG. 31).

[0303] We next determined whether the newly-sequenced phages belong to the phylogenetic groups discovered before. Lood et aL. previously surveyed the phylogenetic diversity of P. acnes phages based on the nucleotide sequences encoding head proteins or amidases of phage isolates [12]. Three major phylogenetic groups were reported. Applicants' data were combined with the data from Lood et aL. and Applicants reconstructed the phylogenetic trees of head protein and amidase gene sequences. The updated phylogenetic trees reproduced the relationships among the strains from the previous study (FIG. 32). However, Applicants' phages were grouped into separate clades. Moreover, by including the gene sequences from the current study, the longest phylogenetic distance among all studied phages was increased from 0.077 to 0.102 for the head protein gene and from 0.140 to 0.182 for the amidase gene. Although these distances are still considerably shorter than those of the closest outgroups (0.939, head protein from mycobacteriophage Che9d; 0.764, P. acnes KPA171202 amidase) [12], the analysis suggests that P. acnes phage diversity is broader than previously described.

[0304] Some of the P. acnes phages appear to be closely related strains as previously shown [12]. Among the 29 sequenced genomes, two groups of closely related strains were observed (FIG. 30). Group I consists of PHL066M04, PHL010M04, and PHL073M02, which are separated by an average phylogenetic distance of 0.002 at the genome level. Group II consists of PHL085M01, PHL085N00, PHL115M02, and PHL037M02, with an average phylogenetic distance of 0.004. These two groups are statistically robust when core regions or the entire genome or only the left-arm or rightarm coding regions were used in calculating the phylogeny (FIGS. 30 and 31).

[0305] Whether the genetic variations among Group I phages or Group II phages were located in particular regions of the genomes was investigated. The sites of sequence variation among Group I phages lie primarily within the region encoding a putataive type II holin and a peptidoglycan amidase (Gp20 and Gp21 as annotated in PA6, FIG. 33). These endolysins permeabilize the membrane and degrade the extracellular peptidoglycan layer to release new phage particles from the bacterial host. The majority of the sequence variations in these two genes among the Group I phage genomes are mostly synonymous and do not appear to affect the functions of the proteins. The genomes of PHL010M02 and PHL066M02 differ at only 11 sites, 9 of which occur in predicted coding regions.

[0306] Genetic variations among Group II members reside in a region encoding homologs of Gp16, Gp17, and Gp18 in PA6 (FIG. 33). These proteins' location near the 3′ end of the left arm between structural proteins and lysis proteins suggests that they may be late-acting genes involved in viral protein processing and packaging.

Alternative Annotations of P. acnes Phage Genomes

[0307] The large number of newly-sequenced P. acnes phage strains provided an opportunity to validate and refine initial annotations of the P. acnes phage genomes. Based on the analysis, several alternative annotations of the phage genomes were confirmed.

[0308] All 15 phage genomes that were sequenced support an alternative annotation of the Gp22/23 locus, which was previously annotated as two ORFs, Gp22 and Gp23, encoded on the plus-strand in the PA6 genome. Homologs of the PA6 genes Gp22 and Gp23 were not consistently identified in the genomes, as many of the homologs have inconsistent start and stop codon positions at the expected plus-strand locations of these genes. However, on the minus-strand, all genomes appear to encode a single ORF with a length of 513-522 bp. This annotation is consistent with the annotation reported by Marinelli et aL. (Marinelli et aL., 2012), which is referred to herein as Gp22/23 (FIG. 29). While no known function was assigned to Gp22 or Gp23 of the original plus-strand annotation, the minus-strand annotation of Gp22/23 in PHL112N00 and PHL111 M01 showed modest similarity to a zinc finger protein from Arthroderma gypseum (E-values 1.0e−4 and 5.7e−4, respectively). The PHL111 M01 annotation also showed similarity to a polyprenyl diphosphate synthase from Streptomyces albus (E-value 2.6e−5) and a polyketide synthase from the Frankia genus (E-value 2.5e−4). The minus-strand Gp22/23 ORFs from most genomes are homologs of each other, except those in PHL067M10 and PHL114L00. The Gp22/23 ORFs in these two genomes form a separate group and share little nucleotide similarity to the other Gp22/23 ORFs despite being present at the same locus in the genome. The observation that this ORF appears in all the phage genomes on the minus strand suggests that this region may be part of the right arm. This is consistent with previous reports of a plus-strand transcriptional terminator that separates Gp22/23 from the rest of the left arm in PA6, PAD20, and PAS50 [11].

[0309] Homologs of the PA6 ORFs Gp42, Gp45, and Gp46, which occur in the right-arm of the genome near the ˜1 kb non-coding region, were not consistently identified. The expected locations of each of these right-arm ORFs in the phage genomes frequently contained numerous stop codons and showed limited homology to corresponding regions of the PA6 genome. This is consistent with the generally high degree of nucleotide variation near the non-coding region and suggests that these ORFs may represent genes that are differentially present among different phage strains.

[0310] The sequencing data demonstrated that the ends of the phage genomes are flanked by 11-nucleotide single-stranded overhangs (Table 12). In the sequencing data of 10 phage genomes, 1-3 reads that span both the 3′ and 5′ ends of the genomes were found. The genome ends in these reads are consistently separated by a sequence that matches the 11-nt single-stranded extension previously reported (Marinelli et aL., 2012). However, based on the sequencing data, the presence of overhangs in three of the 15 genomes: PHL010M04, PHL073M02, and PHL071 N05, were not shown. It is possible that they were simply not detected, as overhang-containing reads were rarely observed in general (2.3 overhang reads per 10,000 reads). Nevertheless, the data do suggest that the phage DNA could be circularized at some point in their life cycle, as previously proposed [11]. The absence of the overhang sequence in reads that map to only one end of the genome may be an artifact of sample processing, as T4 DNA polymerase is used to ‘polish’ fragmented library DNA by digesting 3′ single-strand extensions and extending the complement of 5′ single-strand extensions (Roche Diagnostics, 2009). If so, it is surmisable that the overhang may exist on the 3′ ends of the genome.

Host Range and Specificity of P. acnes Phages

[0311] To investigate the host range and specificity of P. acnes phages, the sequenced phages were screened against a panel of 69 Propionibacterium strains, including 65 P. acnes strains, three P. humerusii strains, and one P. granulosum strain. Except for the P. acnes strains KPA171202 and ATCC 1828, all of these Propionibacterium strains were isolated from the same cohort of subjects sampled for phages. The genomes of all 65 P. acnes strains and three P. humerusii strains were sequenced. A phylogenetic tree of the 65 P. acnes strains based on the SNPs in their core genomic regions was constructed (FIG. 33, left dendrogram). Based on the previously established typing of P. acnes strains by their RecA gene sequences [7], the bacterial collection included all major lineages of P. acnes found on the human skin, with multiple strains representing each type: IA-1, IA-2, IB-1, IB-2, IB-3 and II. The susceptibility/resistance of each of the 69 bacterial strains against each of our 15 sequenced phages was determined using a crossstreak method. In total, 1,035 bacterium-phage interactions were determined. Each experiment was repeated at least five times. For the bacterial strains that showed resistance to phages, the fold changes in efficiency of plaquing (EOP) was determined relative to the P. acnes strain ATCC6919, which is known to be susceptible to all tested strains.

[0312] It was found that the susceptibility/resistance to phage is correlated with the P. acnes lineages. Five of the 69 Propionibacterium strains showed a 100-fold or greater increase in resistance against at least one phage. P. acnes strains of types IA-1, IA-2, IB-1, and IB-2 were all susceptible to all tested phages. However, two strains of type IB-3 (KPA171202 and HL030PA1) were highly resistant to some of the phages (FIG. 34). Type IB-3 strains encode components of a type III restriction modification system (genes PPA1611 and PPA1612 in KPA171202). This may explain their resistance to phages. KPA171202 encodes a cryptic prophage in the genome [17]. However, the sequence of the prophage is not related to any of the sequenced P. acnes phages, therefore, the presence of the cryptic prophage is unlikely to explain the resistance to phages. Three type II strains were also highly resistant to some of the phages. This is consistent with previous observations that strains of this type were more frequently resistant to phages [14].

[0313] On the other hand, the susceptibility/resistance of P. acnes strains to phages did not correlate with phage lineages (r=0.1343, p-value=0.115, Mantel test). Even the host ranges among closely-related phage strains in Group I or Group II are different (FIG. 34). One example is PHL066M04, a Group I phage that showed little similarity to other phages in the same group, but had a similar bacterium-phage interaction pattern to the Group II phages PHL115M02 and PHL037M02. These results suggest that bacterial factors may play an important role in determining the phage host range and specificity.

[0314] To determine whether these phages are specific to only P. acnes or if they are capable of interacting with other Propionibacteria, included were one P. granulosum strain and three P. humerusii strains in the bacterium-phage interaction experiment. P. granulosum is a common skin commensal with approximately 1.1% abundance in the pilosebaceous unit [7]. P. humerusii is a newly-defined species [18]. In the study cohort, P. humerusii is one of the major species found on the skin with an abundance of 1.9% in the pilosebaceous unit [7]. It is closely related to P. acnes with >98% identity in the 16S rRNA gene sequence [18]. While the P. granulosum strain showed strong resistance to all the phages tested, two P. humerusii strains, HL037PA2 and HL037PA3, were susceptible to all the phages. The third P. humerusii strain, HL044PA1, was lysed by ten of the 15 phages tested. This suggests that the host range of P. acnes phages is not limited to P. acnes but also includes P. humerusii and possibly other closely-related Propionibacterium species.

Resistance to Bacteriophages Does not Correlate with the Presence of Matching CRISPR Spacers in P. acnes Strains

[0315] Among the 65 P. acnes isolates, eight strains belong to RT2 and RT6 (RecA type II) and encode CRISPR/Cas genes, which function as a bacterial adaptive immune mechanism against foreign DNA. These RT2 and RT6 strains each have one to nine spacers, 33 nucleotides long, in their CRISPR arrays. In total, they encode 42 spacers, 28 of which are unique.

[0316] Whether the CRISPR/Cas mechanism can explain phage susceptibility/resistance in the RT2 and RT6 strains was investigated. Protospacers in the 15 phage genomes that match a spacer sequence from the RT2 and RT6 P. acnes strains were identified. Up to two mismatches were allowed in the sequence alignments. In all phages, protospacers that match the spacers in at least two P. acnes strains were identified (FIG. 35). These protospacers are all single-copied in the phage genomes and are located primarily on the left arm (FIG. 36). Their locations are generally conserved among all other phage genomes harboring the same protospacer sequences.

[0317] The susceptibility/resistance patterns of the eight RT2 and RT6 P. acnes strains showed little correlation with either the number of spacers in each array that had protospacer matches (r=0.207) or whether at least one match could be found against the CRISPR array in general (r=0.202). Susceptibility/resistance to phages also did not correlate with the pattern with which any specific spacer matched (maximum absolute correlation 0.051).

[0318] Phages can escape the CRISPR defense mechanism by mutating sites involved in protospacer recognition. The short nucleotide motif downstream of the protospacer, known as the protospacer-adjacent motif (PAM), is highly conserved among targets of CRISPR/Cas systems [19]. Mutations in these nucleotides have been found to disrupt CRISPR-mediated resistance despite complete complementarity in the protospacer sequence [20-22]. To determine whether the lack of correlation between bacterial susceptibility/resistance and the presence of matching spacer sequences is due to mutations within the PAM sequence, the PAMs of the nine protospacers that have exact matches to the spacer sequences encoded in HL042PA3 were examined. Six of these protospacers come from phages that HL042PA3 was resistant to, while the other three protospacers are from the phages that were able to lyse HL042PA3. Among the six protospacers, sequence conservation at several sites within their 33-nucleotide length and within the ten downstream nucleotides expected to contain the PAMs were observed (FIG. 37). This suggests that these protospacer motifs are conserved and can be targeted by HL042PA3 CRISPRs. However, these same nucleotide positions are also conserved in the three protospacers from other phages (PHL113M01, PHL112N00, and PHL085M01) that were able to lyse HL042PA3 (FIG. 37). Thus, the conservation of protospacer motifs including the PAMs cannot explain the lack of correlation between bacterial susceptibility/resistance and the presence of matching spacer sequences

[0319] In summary, the data demonstrate that encoding CRISPR spacers that match against the genome of an invading phage is not sufficient for an effective defense, suggesting that transcriptional and/or translational regulation of CRISPR RNA and Cas gene expression may also be required for CRISPR-mediated resistance. Interactions between these bacteria and phages may also depend on additional phage and bacterial components involved in phage binding, entry, replication, or release.

[0320] A diverse group of P. acnes bacteriophages that reside on the human skin has been revealed. Most of the sequenced phages show moderately high genetic similarity with certain strains forming closely-related groups. These phages show various patterns of interaction with P. acnes and P. humerusii strains, but these patterns do not correlate with phage phylogeny. It was determined that resistance or susceptibility to phages correlated well with P. acnes lineages. Types IA-1, IA-2, IB-1, and IB-2 were all susceptible to all tested phages, while certain strains of types IB-3 and II were resistant to some phages. Phage resistance in type II P. acnes strains does not correlate with the presence of CRISPR spacers that match to phage protospacers, suggesting that additional mechanisms, such as regulation of the CRISPR/Cas system and/or other antiviral mechanisms, are needed in conferring the phage resistance.

[0321] This study suggests an important regulatory role of P. acnes bacteriophages in the skin microbiome. The strain-specific host ranges demonstrate the ability of these phages to regulate particular subsets of the P. acnes population and P. humerusii population. Among these subsets of Propionibacterium populations, phages may also disseminate genes that potentially modify virulence, as suggested by Lood and Collin [11], or competitiveness, as it was suggested that gp22/23 encoded in some phages may be potentially involved in the production of polyketide antimicrobials. Both the selective lysis and modification of P. acnes strains by phages potentially regulates the relative abundances of the commensal and pathogenic strains of P. acnes on the skin. This delicate balance between commensals and pathogens can be especially important for skin health and disease at sites where P. acnes dominates. Based on the metagenomic shotgun sequencing data, it is estimated that the ratio between P. acnes phage and P. acnes in the pilosebaceous unit is 1:20 [7], which is far different from the phage:bacteria ratios estimated in environmental microbial communities, where viruses typically outnumber bacteria [23]. This suggests that the human host also plays a role in selecting and regulating the composition and diversity of the microbiome.

### Materials and Methods

### Propionibacteria Culture

[0322] P. acnes, P. humerusii, and P.granulosum strains were cultured under anaerobic conditions in Clostridial media (Oxoid) at 37° C. for 4-6 days. Propionibacterium cultures were used to prepare top agar overlays for phage culture on A media plates (12 g/L pancreatic digest of casein, 12 g/L Difco yeast extract, 22.2 mM D-glucose, 29.4 mM g/L potassium phosphate monobasic, 8 mM magnesium sulphate heptahydrate, 20 g/L Difco agar).

### Phage Isolation and DNA Extraction

[0323] Plaques found on skin sample culture plates were isolated by puncturing the agar with a pipet tip and resuspending in 50 μL SM buffer (0.1 M sodium chloride, 8 mM magnesium sulfate heptahydrate, 1 M Tris-HCl, pH 7.5, 2% gelatin, 1 mM calcium chloride). The phage resuspension was spread onto A media plates with top agar containing P. acnes strain ATCC 6919. After incubation at 37° C. for 2 days, phages were eluted with 8 mL SM buffer at room temperature, filtered with 0.22 uM PES filter (Millipore), and stored at 4° C. Phage titers were determined by plaque assay.

[0324] Phage DNA extraction was performed using the Lambda Mini Kit (Qiagen) with the following modifications. Phage particles were precipitated in Buffer L2 by centrifugation at 20,000 g for 1 hour. Extracted DNA was eluted with Buffer QF and precipitated with isopropanol overnight at −20° C. before centrifugation.

### Phage Genome Sequencing and Annotation

[0325] Phage genomes were sequenced in multiplex using the Roche GS FLX Titanium or Illumina MiSeq platforms. De novo assembly of reads was performed with MIRA [24], and the resulting contigs were manually finished in Consed [25]. For phages covered by more than 20,000 reads, assembly was performed on a randomly-selected subset of 10,000 reads for 454 data or 20,000 reads for MiSeq data. Fully assembled phage genomes were annotated using Genemark.hmm [26] and Glimmer v3.02 [27].

### Genome Sequence Alignment and Phylogenetic Tree Construction

[0326] Sequences present in all 16 phage genomes were defined as core regions of the phage genome. To identify these core regions, alignments were first generated between the PA6 genome and each of the other 15 phage genomes using Nucmer [28]. This yielded 15 sets of starting and ending coordinates describing intervals within the PA6 genome that align with any given phage genome. The core regions were then calculated for all phages by determining the overlapping intervals between all of the 15 coordinate sets. The core region sequences were concatenated for the subsequent multiple sequence alignments. Single nucleotide polymorphisms (SNPs) on the core regions were identified by using the “show-snps” option of Nucmer with the default setting. Using MEGA5 [29], phylogenetic trees were constructed by the Neighbor Joining method on p-distances based on SNP sites. Bootstrapping was based on 200 replicates.

[0327] Multiple sequence alignments of full-length phage genomes, left and right arm coding regions, head protein sequences, and amidase sequences were each generated with MAFFT [30] or Muscle [31]. Phylogenetic trees were constructed in Seaview [32] based on the BioNJ method applied to the Jukes-Cantor distances between the sequences. All trees were bootstrapped for 5,000 replicates.

### Determination of Variation Sites

[0328] Multiple sequence alignments of Group I and Group II phages were generated using MAFFT [30]. In each of these alignments, the positions of all mismatches and gaps (discrepancies) were recorded relative to a reference genome that was chosen at random. Contiguous gaps in the reference genome were counted as a single discrepancy. The reference genome was divided into 50—nucleotide windows, and the discrepancy density of each sequence window was calculated as the total number of discrepancies it contained. Densities were plotted in Artemis [33].

[0329] To determine the single-nucleotide variations within each strain, all read data for each phage, including reads not initially included in the de novo genome assembly, were mapped to their corresponding genomes using Mira. as the sites in each phage genome assembly.

### Bacterial Resistance Test

[0330] The susceptibilities/resistances of Propionibacterium strains against 15 phages were determined using a modified cross-streak assay. The bacterial strains were cultured and streaked in parallel across A media plates (5-6 isolates on each plate, ˜1 cm apart, along with ATCC 6919 as a control). Approximately 5 μL of 106 pfu/mL phage suspension was applied onto each streak, and then the plates were incubated at 37° C. anaerobically for 2 days. At least five replicates of each cross-streak experiment were performed to determine whether the strains were susceptible or resistant judged based on lysis. The resistance of the bacterial strains was further quantified by assaying the efficiency of plaquing of the phages relative to P. acnes strain ATCC 6919, calculated as the following:

$$Resistance = \frac{1}{Efficiency of Plaquing} = \frac{Titer of Phage Strain X on ATCC 6919}{Titer of Phage Strain X on Bacterial Strain Y}$$

[0331] A 100-fold or greater increase in efficiency of plaquing was considered to be evidence of resistance.

### Phage Interaction Correlation

[0332] To determine whether genetically similar phages have similar host range and specificity, the correlation between their phylogenetic and phenotypic relationships was calculated, the latter based on results from the bacterial resistance test. Each column in the bacterial resistance table, which represents the host range of a given phage, was converted to binary form by assigning 1 to instances of resistance and 0 to instances of susceptibility. The Euclidean distance between each column was used to calculate a phenotype distance matrix between all phages. A phylogenetic distance matrix among the phage genomes was calculated using MEGA5 [29]. Using the ade4 package [34] in R, a Mantel test was performed on the phenotype and phylogenetic distance matrices to determine the correlation between the two. 10,000 permutations were performed.

### CRISPR Search

[0333] CRISPR spacer sequences were identified in P. acnes genomes using CRISPRfinder [35]. The extracted spacer sequences were aligned against all phage sequences using BLASTn. Protospacers with up to two mismatches were identified.

### Results

[0334] The genomes of 15 P. acnes phages isolated from human skin were sequenced. The phage genomes showed moderately high sequence similarity and were comparable in size and organization. Based on a comparison of the genomes, most phages diverge from each other, while some of them form closely-related groups that were not described previously. When tested against a panel of 69 Propionibacterium strains, these phages lysed all P. acnes strains except some strains from type IB-3 and II. Some of the phages were also able to lyse Propionibacterium humerusii strains. It was found that bacterial susceptibility/resistance to phages had no significant correlation with phage phylogeny or the presence of the CRISPR spacers in type II P. acnes strains that match the protospacers in the phage genomes.

### CONCLUSIONS

[0335] With 15 new phagel genomes, it was determined that the diversity of P. acnes phages is broader than previously described with novel groups added. The host range and specificity are different among the phages, but are not correlated with the phylogeny of phage genomes. It was also found that encoding CRISPR spacers that match to phage genomes is not sufficient to confer P. acnes resistance to phages. This study provides new insight into the potential application of phages in treating acne and other P. acnes associated diseases.

### REFERENCES CITED IN EXAMPLE 8

[0336] 1. Mc Grath S, van Sinderen D (eds): Bacteriophage: Genetics and Molecular Biology. Norfolk, UK: Caister Academic Press; 2007.
[0337] 2. Rohwer F: Global phage diversity. Cell 2003, 113:141.
[0338] 3. Rohwer F, Thurber RV: Viruses manipulate the marine environment. Nature 2009, 459:207-212.
[0339] 4. Suttle C A, Chan A M, Cottrell M T: Infection of Phytoplankton by Viruses and Reduction of Primary Productivity. Nature 1990, 347:467-469.
[0340] 5. Rodriguez-Valera F, Martin-Cuadrado A B, Rodriguez-Brito B, Pasic L, Thingstad T F, Rohwer F, Mira A: Explaining microbial population genomics through phage predation. Nature reviews Microbiology 2009, 7:828-836.
[0341] 6. Grice E A, Segre J A: The skin microbiome. Nature reviews Microbiology 2011, 9:244-253.
[0342] 7. precedings.nature.com/documents/5305/version/1
[0343] 8. Bojar R A, Holland K T: Acne and Propionibacterium acnes. Clin Dermatol 2004, 22:375-379.
[0344] 9. Leyden J J: The evolving role of Propionibacterium acnes in acne. Semin Cutan Med Surg 2001, 20:139-143.
[0345] 10. Zierdt C H, Webster C, Rude W S: Study of the anaerobic corynebacteria. International Journal of Systematic Bacteriology 1968, 18:33-47.
[0346] 11. Lood R, Collin M: Characterization and genome sequencing of two Propionibacterium acnes phages displaying pseudolysogeny. BMC genomics 2011, 12:198.
[0347] 12. Lood R, Morgelin M, Holmberg A, Rasmussen M, Collin M: Inducible Siphoviruses in superficial and deep tissue isolates of Propionibacterium acnes. BMC microbiology 2008, 8:139.
[0348] 13. Jong E C, Ko H L, Pulverer G: Studies on bacteriophages of Propionibacterium acnes. Med Microbiol Immunol 1975, 161:263-271.
[0349] 14. Webster G F, Cummins C S: Use of bacteriophage typing to distinguish Propionibacterium acne types I and II. Journal of clinical microbiology 1978, 7:84-90.
[0350] 15. Farrar M D, Howson K M, Bojar R A, West D, Towler J C, Parry J, Pelton K, Holland K T: Genome sequence and analysis of a Propionibacterium acnes bacteriophage. Journal of bacteriology 2007, 189:4161-4167.
[0351] 16. Horvath P, Barrangou R: CRISPR/Cas, the immune system of bacteria and archaea. Science 2010, 327:167-170.
[0352] 17. Brzuszkiewicz E, Weiner J, Wollherr A, Thurmer A, Hupeden J, Lomholt H B, Kilian M, Gottschalk G, Daniel R, Mollenkopf H J, et al: Comparative genomics and transcriptomics of Propionibacterium acnes. PloS one 2011, 6:e21581.
[0353] 18. Butler-Wu S M, Sengupta D J, Kittichotirat W, Matsen F A, 3rd, Bumgarner R E: Genome sequence of a novel species, Propionibacterium humerusii. Journal of bacteriology 2011, 193:3678.
[0354] 19. Mojica F J, Diez-Villasenor C, Garcia-Martinez J, Almendros C: Short motif sequences determine the targets of the prokaryotic CRISPR defence system. Microbiology 2009, 155:733-740.
[0355] 20. Westra E R, van Erp P B, Kunne T, Wong S P, Staals R H, Seegers C L, Bollen S, Jore M M, Semenova E, Severinov K, et al: CRISPR immunity relies on the consecutive binding and degradation of negatively supercoiled invader DNA by Cascade and Cas3. Molecular cell 2012, 46:595-605.
[0356] 21. Semenova E, Jore M M, Datsenko K A, Semenova A, Westra E R, Wanner B, van der Oost J, Brouns S J, Severinov K: Interference by clustered regularly interspaced short palindromic repeat (CRISPR) RNA is governed by a seed sequence. Proceedings of the National Academy of Sciences of the United States of America 2011, 108:10098-10103.
[0357] 22. Semenova E, Nagornykh M, Pyatnitskiy M, Artamonova, II, Severinov K: Analysis of CRISPR system function in plant pathogen Xanthomonas oryzae. FEMS microbiology letters 2009, 296:110-116.
[0358] 23. Srinivasiah S, Bhavsar J, Thapar K, Liles M, Schoenfeld T, Wommack K E: Phages across the biosphere: contrasts of viruses in soil and aquatic environments. Research in microbiology 2008, 159:349-357.
[0359] 24. Chevreux B, Pfisterer T, Drescher B, Driesel A J, Muller W E, Wetter T, Suhai S: Using the miraEST assembler for reliable and automated mRNA transcript assembly and SNP detection in sequenced ESTs. Genome research 2004, 14:1147-1159.
[0360] 25. Gordon D, Abajian C, Green P: Consed: a graphical tool for sequence finishing. Genome research 1998, 8:195-202.
[0361] 26. Lukashin A V, Borodovsky M: GeneMark.hmm: new solutions for gene finding. Nucleic acids research 1998, 26:1107-1115.
[0362] 27. Delcher A L, Harmon D, Kasif S, White O, Salzberg SL: Improved microbial gene identification with GLIMMER. Nucleic acids research 1999, 27:4636-4641.
[0363] 28. Kurtz S, Phillippy A, Delcher A L, Smoot M, Shumway M, Antonescu C, Salzberg SL: Versatile and open software for comparing large genomes. Genome biology 2004, 5:R112.
[0364] 29. Tamura K, Peterson D, Peterson N, Stecher G, Nei M, Kumar S: MEGA5: molecular evolutionary genetics analysis using maximum likelihood, evolutionary distance, and maximum parsimony methods. Molecular biology and evolution 2011, 28:2731-2739.
[0365] 30. Katoh K, Misawa K, Kuma K, Miyata T: MAFFT: a novel method for rapid multiple sequence alignment based on fast Fourier transform. Nucleic acids research 2002, 30:3059-3066.
[0366] 31. Edgar R C: MUSCLE: multiple sequence alignment with high accuracy and high throughput. Nucleic acids research 2004, 32:1792-1797.
[0367] 32. Gouy M, Guindon S, Gascuel O: SeaView version 4: A multiplatform graphical user interface for sequence alignment and phylogenetic tree building. Molecular biology and evolution 2010, 27:221-224.
[0368] 33. Rutherford K, Parkhill J, Crook J, Horsnell T, Rice P, Rajandream M A, Barrell B: Artemis: sequence visualization and annotation. Bioinformatics 2000, 16:944-945.
[0369] 34. Dray S, Dufour A B: The ade4 package: Implementing the duality diagram for ecologists. Journal of Statistical Software 2007, 22:1-20.
[0370] 35. Grissa I, Vergnaud G, Pourcel C: CRISPRFinder: a web tool to identify clustered regularly interspaced short palindromic repeats. Nucleic acids research 2007, 35:W52-57.
   [0371] (Nature Precedings Paper). (n.d.). Retrieved from precedings.nature.com/documents/5305/version/1
   [0372] Bojar, R. a, & Holland, K. T. (2004). Acne and Propionibacterium acnes. Clinics in dermatology, 22(5), 375-9. doi:10.1016/j.clindermatol.2004.03.005
   [0373] Farrar, M. D., Howson, K. M., Bojar, R. a, West, D., Towler, J. C., Parry, J., Pelton, K., et aL. (2007). Genome sequence and analysis of a Propionibacterium acnes bacteriophage. Journal of bacteriology, 189(11), 4161-7. doi:10.1128/JB.00106-07
   [0374] Grice, E. a, & Segre, J. a. (2011). The skin microbiome. Nature reviews. Microbiology, 9(4), 244-53. doi:10.1038/nrmicro2537
   [0375] Leyden, J. J. (2001). The evolving role of Propionibacterium acnes in acne. Seminars in cutaneous medicine and surgery, 20(3), 139-43. doi:10.1053/sder.2001.28207
   [0376] Lood, R., & Collin, M. (2011). Characterization and genome sequencing of two Propionibacterium acnes phages displaying pseudolysogeny. BMC genomics, 12(1), 198. doi:10.1186/1471-2164-12-198
   [0377] Marinelli, L. J., Fitz-gibbon, S., Hayes, C., Bowman, C., Inkeles, M., Loncaric, A., & Russell, D. A. (2012). Propionibacterium acnes Bacteriophages Display Limited Genetic Diversity and Broad Killing Activity against Bacterial Skin Isolates. mBio, 3(5), 1-13. doi:10.1128/mBio.00279-12.Editor
   [0378] Mc Grath, S., & van Sinderen, D. (eds). (2007). Bacteriophage: Genetics and Molecular Biology. Norfolk, UK: Caister Academic Press.
   [0379] Roche Diagnostics. (2009). GS FLX Titanium General Library Preparation Method Manual. Mannheim: Roche Diagnostics GmbH.
   [0380] Rodriguez-Valera, F., Martin-Cuadrado, A.-B., Rodriguez-Brito, B., Pasid, L., Thingstad, T. F., Rohwer, F., & Mira, A. (2009). Explaining microbial population genomics through phage predation. Nature reviews. Microbiology, 7(11), 828-36. doi:10.1038/nrmicro2235
   [0381] Rohwer, F. (2003). Global phage diversity. Cell, 113(2), 141.
   [0382] Zierdt, C. H., Webster, C., & Rude, W. S. (1968). Study of the anaerobic corynebacteria. International Journal of Systematic Bacteriology, 18, 33-47.

[0383] All the strains of RT4, RT5, and RT8 show sensitivity to all of the phages shown in Table 13. Therefore, acne patients may be treated with phage by using phage strains that are listed in Table 13:

TABLE 13
Host range and specificity of P. acnes phages

| | RecA | | CRISPR/ | | | | | | |
|---|---|---|---|---|---|---|---|---|---|
| | Type | Ribotype | Cas | PHL113M01 | PHL111M01 | PHL082M00 | PHL060L00 | PHL067M10 | PHL071N05 |
| HL036PA1 | IA | 532 | − | S | S | S | S | S | S |
| HL036PA2 | | 532 | − | S | S | S | S | S | S |
| HL036PA3 | | 1 | − | S | S | S | S | S | S |
| HL046PA2 | | 1 | − | S | S | S | S | S | S |
| HL002PA3 | | 1 | − | S | S | S | S | S | S |
| HL002PA2 | | 1 | − | S | S | S | S | S | S |
| HL005PA2 | | 1 | − | S | S | S | S | S | S |
| HL005PA3 | | 1 | − | S | S | S | S | S | S |
| HL020PA1 | | 1 | − | S | S | S | S | S | S |
| HL027PA2 | | 1 | − | S | S | S | S | S | S |
| HL100PA1 | | 1 | − | S | S | S | S | S | S |
| HL087PA2 | | 1 | − | S | S | S | S | S | S |
| HL013PA2 | | 1 | − | S | S | S | S | S | S |
| HL063PA1 | | 1 | − | S | S | S | S | S | S |
| HL072PA1 | | 5 | − | S | S | S | S | S | S |
| HL072PA2 | | 5 | − | S | S | S | S | S | S |
| HL106PA2 | | 1 | − | S | S | S | S | S | S |
| HL099PA1 | | 4 | − | S | S | S | S | S | S |
| HL083PA1 | | 1 | − | S | S | S | S | S | S |
| HL038PA1 | | 1 | − | S | S | S | S | S | S |
| HL074PA1 | | 4 | − | S | S | S | S | S | S |
| HL005PA1 | | 4 | − | S | S | S | S | S | S |
| HL056PA1 | | 4 | − | S | S | S | S | S | S |
| HL053PA1 | | 4 | − | S | S | S | S | S | S |
| HL045PA1 | | 4 | − | S | S | S | S | S | S |
| HL007PA1 | | 4 | − | S | S | S | S | S | S |
| HL096PA1 | | 4 | − | S | S | S | S | S | S |
| HL043PA1 | | 5 | − | S | S | S | S | S | S |
| HL043PA2 | | 5 | − | S | S | S | S | S | S |
| HL078PA1 | | 1 | − | S | S | S | S | S | S |
| HL086PA1 | IB | 8 | − | S | S | S | S | S | S |
| HL082PA1 | | 8 | − | S | S | S | S | S | S |
| HL110PA2 | | 8 | − | S | S | S | S | S | S |
| HL053PA2 | | 8 | − | S | S | S | S | S | S |
| HL092PA1 | | 8 | − | S | S | S | S | S | S |
| HL110PA1 | | 8 | − | S | S | S | S | S | S |
| HL025PA1 | | 1 | − | S | S | S | S | S | S |
| HL030PA2 | | 3 | − | S | S | S | S | S | S |
| HL063PA2 | | 3 | − | S | S | S | S | S | S |
| HL037PA1 | | 3 | − | S | S | S | S | S | S |
| HL059PA1 | | 16 | − | S | S | S | S | S | S |
| HL059PA2 | | 16 | − | S | S | S | S | S | S |
| HL025PA2 | | 3 | − | S | S | S | S | S | S |
| HL005PA4 | | 3 | − | S | S | S | S | S | S |
| HL067PA1 | | 3 | − | S | S | S | S | S | S |
| HL002PA1 | | 3 | − | S | S | S | S | S | S |
| HL027PA1 | | 3 | − | S | S | S | S | S | S |
| HL046PA1 | | 3 | − | S | S | S | S | S | S |
| HL083PA2 | | 3 | − | S | S | S | S | S | S |
| HL013PA1 | | 3 | − | S | S | S | S | S | S |
| HL050PA1 | | 3 | − | S | S | S | S | S | S |
| HL050PA3 | | 3 | − | S | S | S | S | S | S |
| HL087PA1 | | 3 | − | S | S | S | S | S | S |
| HL087PA3 | | 3 | − | S | S | S | S | S | S |
| KPA171202 | | 1 | − | S | >10⁴ | S | >10⁴ | >10⁵ | S |
| HL030PA1 | | 1 | − | >10⁴ | S | S | S | >10² | S |
| HL050PA2 | II | 1 | − | S | S | S | S | >10⁴ | S |
| HL060PA1 | | 2 | + | S | S | S | S | S | S |
| HL082PA2 | | 2 | + | S | S | S | S | S | S |
| HL001PA1 | | 2 | + | S | >10⁷ | S | S | >10⁷ | S |
| HL106PA1 | | 2 | + | S | S | S | S | S | S |
| ATCC 11828 | | 2 | + | S | S | S | S | S | S |
| HL110PA3 | | 6 | + | S | S | S | S | S | S |
| HL110PA4 | | 6 | + | S | S | S | S | S | S |
| HL042PA3 | | 6 | + | S | >10⁶ | >10⁶ | S | >10⁷ | >10⁵ |
| HL037PA2 | — | P. | − | S | S | S | S | S | S |
| | | humerusii | | | | | | | |
| HL037PA3 | | P. | − | S | S | S | S | S | S |
| | | humerusii | | | | | | | |
| HL044PA1 | | P. | − | S | S | S | >10³ | S | S |
| | | humerusii | | | | | | | |
| HL078PG1 | — | P. | | >10⁷ | >10⁷ | >10⁷ | >10⁷ | >10⁷ | >10⁷ |
| | | granulosum | | | | | | | |
| | PHL1125N00 | PHL037Z02 | PHL085N00 | PHL115M02 | PHL085M01 | PHL114L00 | PHL073M02 | PHL010M04 | PHL066M04 |
| HL036PA1 | S | S | S | S | S | S | S | S | S |
| HL036PA2 | S | S | S | S | S | S | S | S | S |
| HL036PA3 | S | S | S | S | S | S | S | S | S |
| HL046PA2 | S | S | S | S | S | S | S | S | S |
| HL002PA3 | S | S | S | S | S | S | S | S | S |
| HL002PA2 | S | S | S | S | S | S | S | S | S |
| HL005PA2 | S | S | S | S | S | S | S | S | S |
| HL005PA3 | S | S | S | S | S | S | S | S | S |
| HL020PA1 | S | S | S | S | S | S | S | S | S |
| HL027PA2 | S | S | S | S | S | S | S | S | S |
| HL100PA1 | S | S | S | S | S | S | S | S | S |
| HL087PA2 | S | S | S | S | S | S | S | S | S |
| HL013PA2 | S | S | S | S | S | S | S | S | S |
| HL063PA1 | S | S | S | S | S | S | S | S | S |
| HL072PA1 | S | S | S | S | S | S | S | S | S |
| HL072PA2 | S | S | S | S | S | S | S | S | S |
| HL106PA2 | S | S | S | S | S | S | S | S | S |
| HL099PA1 | S | S | S | S | S | S | S | S | S |
| HL083PA1 | S | S | S | S | S | S | S | S | S |
| HL038PA1 | S | S | S | S | S | S | S | S | S |
| HL074PA1 | S | S | S | S | S | S | S | S | S |
| HL005PA1 | S | S | S | S | S | S | S | S | S |
| HL056PA1 | S | S | S | S | S | S | S | S | S |
| HL053PA1 | S | S | S | S | S | S | S | S | S |
| HL045PA1 | S | S | S | S | S | S | S | S | S |
| HL007PA1 | S | S | S | S | S | S | S | S | S |
| HL096PA1 | S | S | S | S | S | S | S | S | S |
| HL043PA1 | S | S | S | S | S | S | S | S | S |
| HL043PA2 | S | S | S | S | S | S | S | S | S |
| HL078PA1 | S | S | S | S | S | S | S | S | S |
| HL086PA1 | S | S | S | S | S | S | S | S | S |
| HL082PA1 | S | S | S | S | S | S | S | S | S |
| HL110PA2 | S | S | S | S | S | S | S | S | S |
| HL053PA2 | S | S | S | S | S | S | S | S | S |
| HL092PA1 | S | S | S | S | S | S | S | S | S |
| HL110PA1 | S | S | S | S | S | S | S | S | S |
| HL025PA1 | S | S | S | S | S | S | S | S | S |
| HL030PA2 | S | S | S | S | S | S | S | S | S |
| HL063PA2 | S | S | S | S | S | S | S | S | S |
| HL037PA1 | S | S | S | S | S | S | S | S | S |
| HL059PA1 | S | S | S | S | S | S | S | S | S |
| HL059PA2 | S | S | S | S | S | S | S | S | S |
| HL025PA2 | S | S | S | S | S | S | S | S | S |
| HL005PA4 | S | S | S | S | S | S | S | S | S |
| HL067PA1 | S | S | S | S | S | S | S | S | S |
| HL002PA1 | S | S | S | S | S | S | S | S | S |
| HL027PA1 | S | S | S | S | S | S | S | S | S |
| HL046PA1 | S | S | S | S | S | S | S | S | S |
| HL083PA2 | S | S | S | S | S | S | S | S | S |
| HL013PA1 | S | S | S | S | S | S | S | S | S |
| HL050PA1 | S | S | S | S | S | S | S | S | S |
| HL050PA3 | S | S | S | S | S | S | S | S | S |
| HL087PA1 | S | S | S | S | S | S | S | S | S |
| HL087PA3 | S | S | S | S | S | S | S | S | S |
| KPA171202 | >10⁷ | >10³ | >10⁴ | >10⁴ | >10⁴ | >10⁴ | >10⁴ | >10⁵ | >10⁷ |
| HL030PA1 | >10³ | >10³ | >10³ | >10³ | >10² | >10³ | >10⁴ | >10⁵ | >10⁴ |
| HL050PA2 | S | S | S | S | S | S | S | S | S |
| HL060PA1 | S | S | S | S | S | S | S | S | S |
| HL082PA2 | S | S | S | S | S | S | S | S | S |
| HL001PA1 | S | S | S | S | S | >10⁶ | S | S | S |
| HL106PA1 | S | S | S | S | S | S | S | S | S |
| ATCC | S | S | S | S | S | S | S | S | S |
| 11828 | | | | | | | | | |
| HL110PA3 | S | S | S | S | S | S | S | S | S |
| HL110PA4 | S | S | S | S | S | S | S | S | S |
| HL042PA3 | S | >10⁷ | >10⁶ | >10⁷ | S | >10⁷ | >10⁷ | >10⁷ | >10⁷ |
| HL037PA2 | S | S | S | S | S | S | S | S | S |
| HL037PA3 | S | S | S | S | S | S | S | S | S |
| HL044PA1 | >10⁴ | >10³ | S | >10² | S | S | S | S | >10² |
| HL078PG1 | >10⁷ | >10⁷ | >10⁷ | >10⁷ | >10⁷ | >10⁷ | >10⁷ | >10⁷ | >10⁷ |

S susceptible
10′ fold increase in resistance

[0384] Strains in the IB-3 lineage show resistance against most of the tested phages. Therefore, patients with those strains may not benefit as much from phage therapy. SEQ ID NOs 55-81 include four unique genomic sequences for strains in the IB-3 lineage and for several other strains, such as IB-3-s1 (IB-3 and SK 87), IB-3-s2 (IB-3 and HL025PA1), IB-3-s3 (IB-3 and HL201 PA1), IB-3-s4 (IB-3 and HL201 PA1). The sequence similarities range from 95% to 100%. Primers targeting these sequences can be used to estimate and predict the effectiveness of phage therapy.

[0385] FIG. 26 shows the phylogenetic tree of the 32 phages including the 18 sequenced phages. There are phage strains highly similar to each other, such as the ones in Groups I and II. This suggests that the same phages can be found in different individuals and supports that a particular phage strain can be used as a common treatment agent for different individuals. SEQ ID NOs 33-50 reflect the genome sequences of the 18 sequenced phages, including the 15 phages shown in Table 13.

Potential Therapeutic Phaqe for Patients with Microbiome Type I Include:

[0386] PHL113M01, PHL111 M01, PHL082M00, PHL060L00, PHL067M10, PHL071N05, PHL112N00, PHL037M02, PHL085N00, PHL115M02, PHL085M01, PHL114L00, PHL073M02, PHL010M04, and PHL066M04.

Potential Therapeutic Phaqe for Patients with Microbiome Type I with IB-3 Strain Include:

[0387] PHL082M00 and PHL071 N05.

Potential Therapeutic Phaqe for Patients with Microbiome Type II Include:

[0388] PHL113M01, PHL060L00, PHL112N00, and PHL085M01.

Potential Therapeutic Phaqe for Patients with Microbiome Type III or Dominant Rt8 Include:

[0389] PHL113M01, PHL111 M01, PHL082M00, PHL060L00, PHL067M10, PHL071N05, PHL112N00, PHL037M02, PHL085N00, PHL115M02, PHL085M01, PHL114L00, PHL073M02, PHL010M04, and PHL066M04.

Potential Therapeutic Phaqe for Patients with Microbiome Type IV Include:

[0390] PHL113M01, PHL111 M01, PHL082M00, PHL060L00, PHL067M10, PHL071N05, PHL112N00, PHL037M02, PHL085N00, PHL115M02, PHL085M01, PHL114L00, PHL073M02, PHL010M04, and PHL066M04.

Potential Therapeutic Phaqe for Patients with Microbiome Type V Include:

[0391] PHL113M01, PHL111 M01, PHL082M00, PHL060L00, PHL067M10, PHL071N05, PHL112N00, PHL037M02, PHL085N00, PHL115M02, PHL085M01, PHL114L00, PHL073M02, PHL010M04, and PHL066M04.

Specific Interactions Between Propionibacterium Humerusii and P. acnes Phages

[0392] Some of the P. acnes phage strains can lyse a closely related Propionibacterium species, P. humerusii, which has been hypothesized to be associated with infection in prostheses. P. acnes phage strains that can lyse P. humerusii strains can be potentially used as a therapeutic agent for P. humerusii associated diseases.

### Potential Therapeutic Phaqe for P. Humerusii Associated Diseases Include:

[0393] PHL113M01, PHL111M01, PHL082M00, PHL067M10, PHL071N05, PHL085N00, PHL085M01, PHL114L00, PHL073M02, and PHL010M04.

[0394] ORFs in Phage Genomes That Show Identity of 85% or Less to Their PA6 Homolog

| | nucleotide | percent difference | |
|---|---|---|---|
| phages_gene name | differences | relative to PA6 | PA6 ORF length |
| PA6_gp10 | | | 372 |
| PHL113M01_gp9 | 56 | 0.849462366 | |
| PHL112N00_gp9 | 58 | 0.838709877 | |
| PHL114L00_gp10 | 60 | 0.838709677 | |
| PHL010M04_gp11 | 56 | 0.849462366 | |
| PHL082M00_gp10 | 60 | 0.838709677 | |
| PA6_gp19 | | | 747 |
| PHL114L00_gp19 | 120 | 0.83935743 | |
| PHL010M04_gp20 | 138 | 0.814261044 | |
| PHL055M04_gp20 | 138 | 0.814261044 | |
| PHL073M02_gp20 | 138 | 0.814261044 | |
| PA6_gp44 | | | 309 |
| PHL060L00_gp47 | 83 | 0.731391586 | |
| PHL056M04_gp43 | 75 | 0.757281553 | |
| PHL056M04_gp43 | 74 | 0.760517799 | |
| PHL073M02_gp43 | 74 | 0.760517799 | |
| PHL067M10_gp43 | 74 | 0.760517799 | |
| PHL082N00_gp43 | 66 | 0.786407767 | |
| PA6_gp33 | | | 357 |
| PHL115M02_gp37 | 54 | 0.848739456 | |
| PHL085M02_gp32 | 54 | 0.848739456 | |
| PHL037M02_gp31 | 54 | 0.848739456 | |
| PHL085N00_gp32 | 54 | 0.848739456 | |
| PA6_gp45 | | | 183 |
| PHL111M02_gp44. | 33 | 0.819672131 | |
| PA6_gp21 | | | 402 |
| PHL112N00_gp20 | 71 | 0.823383085 | |
| PHL010M02_gp22 | 85 | 0.788557214 | |
| PHL056M02_gp22 | 84 | 0.791044776 | |
| PHL073M02_gp22 | 78 | 0.805970149 | |
| PHL071N05_gp21 | 61 | 0.848258786 | |
| PHL087M10_gp22 | 63 | 0.843285582 | |
| PHL115M02_gp26 | 65 | 0.838308455 | |
| PHL085M01_gp22 | 65 | 0.838308458 | |
| PHL037M02_gp21 | 65 | 0.838308455 | |
| PHL085M00_gp22 | 65 | 0.838308458 | |
| PA6_gp40 | | | 228 |
| PHL111M01_gp41 | 37 | 0.837719288 | |
| PHL080L00_gp42 | 37 | 0.837719288 | |
| PHL112N00_gp39 | 54 | 0.763157885 | |
| PHL113M01_gp43 | 38 | 0.833333333 | |
| PHL114L00_gp40 | 40 | 0.824562404 | |
| PHL010M04_gp40 | 50 | 0.780702754 | |
| PHL066M04_gp40 | 50 | 0.780702754 | |
| PHL073M02_gp40 | 50 | 0.780702754 | |
| PHL071N06_gp39 | 39 | 0.828847358 | |
| PHL067M10_gp40 | 37 | 0.837719288 | |
| PHL115M02_gp45 | 43 | 0.811403509 | |
| PHL085M01_gp40 | 43 | 0.811403509 | |
| PHL037M02_gp39 | 43 | 0.811403509 | |
| PHL085N00_gp40 | 43 | 0.811403509 | |
| PHL082M00_gp39 | 42 | 0.815789474 | |
| PA6_gp22_23 | | | 504 |
| PHL114L00_gp22 | 187 | 0.628958254 | |
| PHL010M04_gp23 | 110 | 0.781746032 | |
| PHL066M04_gp23 | 110 | 0.781746032 | |
| PHL073M02_gp23 | 110 | 0.781746032 | |
| PHL067M10_gp23 | 186 | 0.630952383 | |
| PA6_gp29 | | | 567 |
| PHL060L00_gp30 | 88 | 0.844797178 | |
| PHL112N00_gp27 | 105 | 0.814814815 | |
| PHL114L00_gp28 | 98 | 0.827160494 | |
| PA6_gp35 | | | 471 |
| PHL114L00_gp33 | 76 | 0.838641189 | |
| PA6_gp41 | | | 540 |
| PHL111M02_gp42 | 109 | 0.798188145 | |
| PHL060L00_gp43 | 104 | 0.807407407 | |
| PHL112N00_gp40 | 118 | 0.781481481 | |
| PHL113M01_gp44 | 107 | 0.801851852 | |
| PHL114L00_gp41 | 124 | 0.77037037 | |
| PHL071N05_gp40 | 110 | 0.796296296 | |
| PHL067M10_gp41 | 119 | 0.77962963 | |
| PHL115M02_gp46 | 112 | 0.792592593 | |
| PHL085M02_gp41 | 112 | 0.792592593 | |
| PHL037M02_gp40 | 112 | 0.792592593 | |
| PHL085N00_gp41 | 112 | 0.792592593 | |
| PHL082M00_gp40 | 111 | 0.794444444 | |
| PA6_gp47 | | | 180 |
| PHL115M02_gp50 | 35 | 0.80555556 | |
| PHL085M02_gp45 | 35 | 0.80555556 | |
| PHL037M02_gp44 | 35 | 0.80555556 | |
| PHL111M02_gp45 | 43 | 0.781111111 | |
| PHL071N05_gp44.1 | 32 | 0.822222222 | |
| PHL114L00_gp45.1 | 38 | 0.788888889 | |
| PHL113M01_gp47 | 31 | 0.827777778 | |
| PHL085M00_gp45 | 55 | 0.805555556 | |
| PA6_gp24 | | | 393 |
| PHL114L00_gp23 | 75 | 0.809160305 | |
| PHL010M04_gp24 | 66 | 0.832061069 | |
| PHL066M04_gp24 | 66 | 0.832061069 | |
| PHL073M02_gp24 | 66 | 0.832061069 | |
| PHL067M10_gp24 | 61 | 0.844783715 | |
| PHL115M02_gp29 | 65 | 0.834505598 | |
| PHL085M01_gp24 | 65 | 0.834505598 | |
| PHL037M02_gp23 | 65 | 0.834505598 | |
| PHL085N00_gp24 | 65 | 0.834505598 | |
| PA6_gp30 | | | 564 |
| PHL111M02_gp29 | 115 | 0.796099291 | |
| PHL113M01_gp31 | 105 | 0.813829787 | |
| PHL082M00_gp20 | 118 | 0.794326241 | |
| PA6_gp18 | | | 264 |
| PHL112N00_gp17 | 40 | 0.848484848 | |
| PHL082M00_gp18 | 41 | 0.84469697 | |
| PA6_gp37 | | | 948 |
| PHL112N00_gp34 | 168 | 0.82278481 | |
| PHL114L00_gp35 | 163 | 0.828059072 | |
| PA6_gp36 | | | 411 |
| PHL111M01_gp36 | 80 | 0.805352798 | |
| PHL112N00_gp33 | 76 | 0.815085158 | |
| PHL113M01_gp38 | 82 | 0.800486618 | |
| PHL114L00_gp34 | 86 | 0.790754258 | |
| PHL101M04_gp35 | 82 | 0.800486618 | |
| PHL066M04_gp35 | 82 | 0.800486618 | |
| PHL073M02_gp35 | 82 | 0.800486618 | |
| PHL071N05_gp34 | 82 | 0.800486618 | |
| PHL115M02_gp40 | 68 | 0.834549878 | |
| PHL085M01_gp35 | 68 | 0.834549878 | |
| PHL037M02_gp34 | 68 | 0.834549878 | |
| PHL085N00_gp35 | 68 | 0.834549878 | |
| PHL082M00_gp34 | 85 | 0.793187348 | |

### Example 9—Drug Development

[0395] Based on the foregoing, it is now known that some P. acnes strains are associated with acne. Therefore, at the time of diagnosis, it will be useful for dermatologists to know which strains are dominant on the skin of the patient. In order to do this, at first one needs to extract bacterial DNA from the skin sample of the patient. The method/kit to isolate bacterial DNA from the skin for downstream analysis detailed above can be implemented in practice. After bacterial DNA is extracted, the fast and accurate detection/diagnosis method/kit to identify the microbiome type of the patients, detailed above, can be implemented for diagnosis. Once the microbiome type of the patient is diagnosed, several approaches can be used to treat the patient.

[0396] For example, if the patient has microbiome types IV or V, or is dominated by P. acnes RT10 strains, it is less likely antibiotic treatment would succeed, because these strains are antibiotic resistant. These patients should be treated using other therapies, such as retinoids or the methods. In the case that the patient has the virulent ribotypes, including RT4, RT5, and RT8, drugs targeting specifically to RT4, RT5, and RT8, can be used. For example, small molecules, antisense molecules, siRNA, biologics, antibodies, or combinations thereof targeting the genetic elements and biological pathways unique to the P. acnes strains associated with acne, detailed above, can be used.

### Example 10—Additional Therapies

[0397] In the case that the dominant P. acnes strains in the patient do not harbor a set of CRISPR/Cas, additional treatment of phage therapy based on the foregoing can be used. For example, bacteriophage-based strain-specific therapy to treat acne can be employed. An alternative treatment strategy is to balance the relative abundance of the P. acnes strains by promoting the growth of health-associated strains. The strains associated with health can be used as probiotics. These can be topical creams, solutions, or other cosmetic products.

[0398] For prevention purposes, vaccine can be developed against virulent strains of P. acnes.

[0399] Longitudinal studies determine whether the microbiome types change over time and whether certain strains persist on subjects after treatment.

[0400] Inoculation experiments, inoculating virulent and healthy strains, determine whether P. acnes strain population changes.

[0401] Specific interactions between P. acnes strains and phages may be studied.

[0402] Immune responses in human cells against different strains of P. acnes may also be measured.

[0403] The following publications are incorporated herein by reference in their entireties for all purposes, as are all other publications referenced herein and the Sequence Listing:

[0404] E. Grice et aL., 324 Science 1190-1192 (2009).

What is claimed:

1. A method for treating an individual suffering from acne of microbiome type I comprising administering to said individual an effective amount of a phage, wherein said phage is selected from the group consisting of: PHL113M01 (SEQ ID NO:36), PHL111M01 (SEQ ID NO:33), PHL082M00 (SEQ ID NO:47), PHL060L00 (SEQ ID NO:34), PHL067M10 (SEQ ID NO:42), PHL071N05 (SEQ ID NO:41), PHL112N00 (SEQ ID NO:35), PHL037M02 (SEQ ID NO:40), PHL085N00 (SEQ ID NO:46), PHL115M02 (SEQ ID NO:43), PHL085M01 (SEQ ID NO:44), PHL114L00 (SEQ ID NO:37), PHL010M04 (SEQ ID NO:38), and PHL066M04 (SEQ ID NO:39).

2. A method for treating an individual suffering from acne of microbiome type I with IB-3 strain comprising administering to said individual an effective amount of a phage, wherein said phage is selected from the group consisting of: PHL082M00 (SEQ ID NO:47) and PHL071N05 (SEQ ID NO:41).

3. A method for treating an individual suffering from acne of microbiome type II comprising administering to said individual an effective amount of a phage, wherein said phage is selected from the group consisting of: PHL113M01 (SEQ ID NO:36), PHL060L00 (SEQ ID NO:34), PHL112N00 (SEQ ID NO:35), and PHL085M01 (SEQ ID NO:44).

4. A method for treating a Propionibacterium humerusii-associated malady comprising administering to said individual an effective amount of a phage, wherein said phage is selected from the group consisting of: PHL113M01 (SEQ ID NO:36), PHL111 M01 (SEQ ID NO:33), PHL082M00 (SEQ ID NO:47), PHL067M10 (SEQ ID NO:42), PHL071N05 (SEQ ID NO:41), PHL085N00 (SEQ ID NO:46), PHL085M01 (SEQ ID NO:44), PHL114L00 (SEQ ID NO:37), PHL073M02 (SEQ ID NO:40), and PHL010M04 (SEQ ID NO:38).

The application's sequence listing, which the Patent Office published only in electronic form, follows.

SEQUENCE LISTING (504 sequences)

SEQ ID NO: 1 - DNA, 1504 bp, Propionibacterium acnes
  source 1..1504: mol_type = genomic DNA
acgaacgctggcggcgtgcttaacacatgcaagtcgaacggaaaggccctgcttttgtggggtgctcgagtggcgaacgggtgagtaacacgtgagtaacctgcccttgactttgggataacttcaggaaactggggctaataccggataggagctcctgctgcatggtgggggttggaaagtttcggcggttggggatggactcgcggcttatcagcttgttggtggggtagtggcttaccaaggctttgacgggtagccggcctgagagggtgaccggccacattgggactgagatacggcccagactcctacgggaggcagcagtggggaatattgcacaatgggcggaagcctgatgcagcaacgccgcgtgcgggatgacggccttcgggttgtaaaccgctttcgcctgtgacgaagcgtgagtgacggtaatgggtaaagaagcaccggctaactacgtgccagcagccgcggtgatacgtagggtgcgagcgttgtccggatttattgggcgtaaagggctcgtaggtggttgatcgcgtcggaagtgtaatcttggggcttaaccctgagcgtgctttcgatacgggttgacttgaggaaggtaggggagaatggaattcctggtggagcggtggaatgcgcagatatcaggaggaacaccagtggcgaaggcggttctctgggcctttcctgacgctgaggagcgaaagcgtggggagcgaacaggcttagataccctggtagtccacgctgtaaacggtgggtactaggtgtggggtccattccacgggttccgtgccgtagctaacgctttaagtaccccgcctggggagtacggccgcaaggctaaaactcaaaggaattgacggggccccgcacaagcggcggagcatgcggattaattcgatgcaacgcgtagaaccttacctgggtttgacatggatcgggagtgctcagagatgggtgtgcctcttttggggtcggttcacaggtggtgcatggctgtcgtcagctcgtgtcgtgagatgttgggttaagtcccgcaacgagcgcaacccttgttcactgttgccagcacgttatggtggggactcagtggagaccgccggggtcaactcggaggaaggtggggatgacgtcaagtcatcatgccccttatgtccagggcttcacgcatgctacaatggctggtacagagagtggcgagcctgtgagggtgagcgaatctcggaaagccggtctcagttcggattggggtctgcaactcgacctcatgaagtcggagtcgctagtaatcgcagatcagcaacgctgcggtgaatacgttcccggggcttgtacacaccgcccgtcaagtcatgaaagttggtaacacccgaagccggtggcctaaccgttgtgggggagccgtcgaaggtgggactggtgattaggactaagtcgtaacaaggtagccgtaccggaaggtgcggctggatcacctcctttctaagga

SEQ ID NO: 2 - DNA, 1504 bp, Propionibacterium acnes
  source 1..1504: mol_type = genomic DNA
acgaacgctggcggcgtgcttaacacatgcaagtcgaacggaaaggccctgcttttgtggggtgctcgagtggcgaacgggtgagtaacacgtgagtaacctgcccttgactttgggataacttcaggaaactggggctaataccggataggagctcctgctgcatggtgggggttggaaagtttcggcggttggggatggactcgcggcttatcagcttgttggtggggtagtggcttaccaaggctttgacgggtagccggcctgagagggtgaccggccacattgggactgagatacggcccagactcctacgggaggcagcagtggggaatattgcacaatgggcggaagcctgatgcagcaacgccgcgtgcgggatgacggccttcgggttgtaaaccgctttcgcctgtgacgaagcgtgagtgacggtaatgggtaaagaagcaccggctaactacgtgccagcagccgcggtgatacgtagggtgcgagcgttgtccggatttattgggcgtaaagggctcgtaggtggttgatcgcgtcggaagtgtaatcttggggcttaaccctgagcgtgctttcgatacgggttgacttgaggaaggtaggggagaatggaattcctggtggagcggtggaatgcgcagatatcaggaggaacaccagtggcgaaggcggttctctgggcctttcctgacgctgaggagcgaaagcgtggggagcgaacaggcttagataccctggtagtccacgctgtaaacggtgggtactaggtgtggggtccattccacgggttccgcgccgtagctaacgctttaagtaccccgcctggggagtacggccgcaaggctaaaactcaaaggaattgacggggccccgcacaagcggcggagcatgcggattaattcgatgcaacgcgtagaaccttacctgggtttgacatggatcgggagtgctcagagatgggtgtgcctcttttggggtcggttcacaggtggtgcatggctgtcgtcagctcgtgtcgtgagatgttgggttaagtcccgcaacgagcgcaacccttgttcactgttgccagcacgttatggtggggactcagtggagaccgccggggtcaactcggaggaaggtggggatgacgtcaagtcatcatgccccttatgtccagggcttcacgcatgctacaatggctggtacagagagtggcgagcctgtgagggtgagcgaatctcggaaagccggtctcagttcggattggggtctgcaactcgacctcatgaagtcggagtcgctagtaatcgcagatcagcaacgctgcggtgaatacgttcccggggcttgtacacaccgcccgtcaagtcatgaaagttggtaacacccgaagccggtggcctaaccgttgtgggggagccgtcgaaggtgggactggtgattaggactaagtcgtaacaaggtagccgtaccggaaggtgcggctggatcacctcctttctaagga

SEQ ID NO: 3 - DNA, 1504 bp, Propionibacterium acnes
  source 1..1504: mol_type = genomic DNA
acgaacgctggcggcgtgcttaacacatgcaagtcgaacggaaaggccctgcttttgtggggtgctcgagtggcgaacgggtgagtaacacgtgagtaacctgcccttgactttgggataacttcaggaaactggggctaataccggataggagctcctgctgcatggtgggggttggaaagtttcggcggttggggatggactcgcggcttatcagcttgttggtggggtagtggcttaccaaggctttgacgggtagccggcctgagagggtgaccggccacattgggactgagatacggcccagactcctacgggaggcagcagtggggaatattgcacaatgggcggaagcctgatgcagcaacgccgcgtgcgggatgacggccttcgggttgtaaaccgctttcgcctgtgacgaagcgtgagtgacggtaatgggtaaagaagcaccggctaactacgtgccagcagccgcggtgatacgtagggtgcgagcgttgtccggatttattgggcgtaaagggctcgtaggtggttgatcgcgtcggaagtgtaatcttggggcttaaccctgagcgtgctttcgatacgggttgacttgaggaaggtaggggagaatggaattcctggtggagcggtggaatgcgcagatatcaggaggaacaccagtggcgaaggcggttctctgggcctttcctgacgctgaggagcgaaagcgtggggagcgaacaggcttagataccctggtagtccacgctgtaaacggtgggtactaggtgtggggtccattccacgggttccgtgccgtagctaacgctttaagtaccccgcctggggagtacggccgcaaggctaaaactcaaaggaattgacggggccccgcacaagcggcggagcatgcggattaattcgatgcaacgcgtagaaccttacctgggtttgacatggatcgggagcgctcagagatgggtgtgcctcttttggggtcggttcacaggtggtgcatggctgtcgtcagctcgtgtcgtgagatgttgggttaagtcccgcaacgagcgcaacccttgttcactgttgccagcacgttatggtggggactcagtggagaccgccggggtcaactcggaggaaggtggggatgacgtcaagtcatcatgccccttatgtccagggcttcacgcatgctacaatggctggtacagagagtggcgagcctgtgagggtgagcgaatctcggaaagccggtctcagttcggattggggtctgcaactcgacctcatgaagtcggagtcgctagtaatcgcagatcagcaacgctgcggtgaatacgttcccggggcttgtacacaccgcccgtcaagtcatgaaagttggtaacacccgaagccggtggcctaaccgttgtgggggagccgtcgaaggtgggactggtgattaggactaagtcgtaacaaggtagccgtaccggaaggtgcggctggatcacctcctttctaagga

SEQ ID NO: 4 - DNA, 1504 bp, Propionibacterium acnes
  source 1..1504: mol_type = genomic DNA
acgaacgctggcggcgtgcttaacacatgcaagtcgaacggaaaggccctgcttttgtggggtgctcgagtggcgaacgggtgagtaacacgtgagtaacctgcccttgactttgggataacttcaggaaactggggctaataccggataggagctcctgctgcatggtgggggttggaaagtttcggcggttggggatggactcgcggcttatcagcttgttggtggggtagtggcttaccaaggctttgacgggtagccggcctgagagggtgaccggccacattgggactgagatacggcccagactcctacgggaggcagcagtggggaatattgcacaatgggcggaagcctgatgcagcaacgccgcgtgcgggatgacggccttcgggttgtaaaccgctttcgcctgtgacgaagcgtgagtgacggtaatgggtaaagaagcaccggctaactacgtgccagcagccgcggtgatacgtagggtgcgagcgttgtccggatttattgggcgtaaagggctcgtaggtggttgatcgcgtcggaagtgtaatcttggggcttaaccctgagcgtgctttcgatacgggttgacttgaggaaggtaggggagaatggaattcctggtggagcggtggaatgcgcagatatcaggaggaacaccagtggcgaaggcggttctctgggcctttcctgacgctgaggagcgaaagcgtggggagcgaacaggcttagataccctggtagtccacgctgtaaacggtgggtactaggtgtggggtccattccacgggttccgtgccgtagctaacgctttaagtaccccgcctggggagtacggccgcaaggctaaaactcaaaggaattgacggggccccgcacaagcggcggagcatgcggattaattcgatgcaacgcgtagaaccttacctgggtttgacatggatcgggagtgctcagagatgggtgtgcctcttttggggtcggttcacaggtggtgcatgcctgtcgtcagctcgtgtcgtgagatgttgggttaagtcccgcaacgagcgcaacccttgttcactgttgccagcacgttatggtggggactcagtggagaccgccggggtcaactcggaggaaggtggggatgacgtcaagtcctcatgccccttatgtccagggcttcacgcatgctacaatggctggtacagagagtggcgagcctgtgagggtgagcgaatctcggaaagccggtctcagttcggattggggtctgcaactcgacctcatgaagtcggagtcgctagtaatcgcagatcagcaacgctgcggtgaatacgttcccggggcttgtacacaccgcccgtcaagtcatgaaagttggtaacacccgaagccggtggcctaaccgttgtgggggagccgtcgaaggtgggactggtgattaggactaagtcgtaacaaggtagccgtaccggaaggtgcggctggatcacctcctttctaagga

SEQ ID NO: 5 - DNA, 1504 bp, Propionibacterium acnes
  source 1..1504: mol_type = genomic DNA
acgaacgctggcggcgtgcttaacacatgcaagtcgaacggaaaggccctgcttttgtggggtgctcgagtggcgaacgggtgagtaacacgtgagtaacctgcccttgactttgggataacttcaggaaactggggctaataccggataggagctcctgctgcatggtgggggttggaaagtttcggcggttggggatggactcgcggcttatcagcttgttggtggggtagtggcttaccaaggctttgacgggtagccggcctgagagggtgaccggccacattgggactgagatacggcccagactcctacgggaggcagcagtggggaatattgcacaatgggcggaagcctgatgcagcaacgccgcgtgcgggatgacggccttcgggttgtaaaccgctttcgcctgtgacgaagcgtgagtgacggtaatgggtaaagaagcaccggctaactacgtgccagcagccgcggtgatacgtagggtgcgagcgttgtccggatttattgggcgtaaagggctcgtaggtggttgatcgcgtcggaagtgtaatcttggggcttaaccctgagcgtgctttcgatacgggttgacttgaggaaggtaggggagaatggaattcctggtggagcggtggaatgcgcagatatcaggaggaacaccagtggcgaaggcggttctctgggcctttcctgacgctgaggagcgaaagcgtggggagcgaacaggcttagataccctggtagtccacgctgtaaacggtgggtactaggtgtggggtccattccacgggttccgtgccgtagctaacgctttaagtaccccgcctggggagtacggccgcaaggctaaaactcaaaggaattgacggggccccgcacaagcggcggagcatgcggattaattcgatgcaacgcgtagaaccttacctgggtttgacatggatcgggagtgctcagagatgggtgtgcctcttttggggtcggttcacaggtggtgcatgcctgtcgtcagctcgtgtcgtgagatgttgggttaagtcccgcaacgagcgcaacccttgttcactgttgccagcacgttatggtggggactcagtggagaccgccggggtcaactcggaggaaggtggggatgacgtcaagtcatcatgccccttatgtccagggcttcacgcatgctacaatggctggtacagagagtggcgagcctgtgagggtgagcgaatctcggaaagccggtctcagttcggattggggtctgcaactcgacctcatgaagtcggagtcgctagtaatcgcagatcagcaacgctgcggtgaatacgttcccggggcttgtacacaccgcccgtcaagtcatgaaagttggtaacacccgaagccggtggcctaaccgttgtgggggagccgtcgaaggtgggactggtgattaggactaagtcgtaacaaggtagccgtaccggaaggtgcggctggatcacctcctttctaagga

SEQ ID NO: 6 - DNA, 1504 bp, Propionibacterium acnes
  source 1..1504: mol_type = genomic DNA
acgaacgctggcggcgtgcttaacacatgcaagtcgaacggaaaggccctgcttttgtggggtgctcgagtggcgaacgggtgagtaacacgtgagtaacctgcccttgactttgggataacttcaggaaactggggctaataccggataggagctcctgctgcatggtgggggttggaaagtttcggcggttggggatggactcgcggcttatcagcttgttggtggggtagtggcttaccaaggctttgacgggtagccggcctgagagggtgaccggccacattgggactgagatacggcccagactcctacgggaggcagcagtggggaatattgcacaatgggcggaagcctgatgcagcaacgccgcgtgcgggatgacggccttcgggttgtaaaccgctttcgcctgtgacgaagcgtgagtgacggtaatgggtaaagaagcaccggctaactacgtgccagcagccgcggtgatacgtagggtgcgagcgttgtccggatttattgggcgtaaagggctcgtaggtggttgatcgcgtcggaagtgtaatcttggggcttaaccctgagcgtgctttcgatacgggttgacttgaggaaggtaggggagaatggaattcctggtggagcggtggaatgcgcagatatcaggaggaacaccagtggcgaaggcggttctctgggcctttcctgacgctgaggagcgaaagcgtggggagcgaacaggcttagataccctggtagtccacgctgtaaacggtgggtactaggtgtggggtccattccacgggttccgcgccgtagctaacgctttaagtaccccgcctggggagtacggccgcaaggctaaaactcaaaggaattgacggggccccgcacaagcggcggagcatgcggattaattcgatgcaacgcgtagaaccttacctgggtttgacatggatcgggagtgctcagagatgggtgtgcctcttttggggtcggttcacaggtggtgcatggctgtcgtcagctcgtgtcgtgagatgttgggttaagtcccgcaacgagcgcaacccttgttcactgttgccagcacgttatggtggggactcagtggagaccgccggggtcaactcggaggaaggtggggatgacgtcaagtcatcatgccccttatgtccagggcttcacgcatgctacaatggctggtacagagagtggcgagcctgtgagggtgagcgaatctcggaaagccggtctcagttcggattggggtctgcaactcgacctcatgaagttggagtcgctagtaatcgcagatcagcaacgctgcggtgaatacgttcccggggcttgtacacaccgcccgtcaagtcatgaaagttggtaacacccgaagccggtggcctaaccgttgtgggggagccgtcgaaggtgggactggtgattaggactaagtcgtaacaaggtagccgtaccggaaggtgcggctggatcacctcctttctaagga

SEQ ID NO: 7 - DNA, 1504 bp, Propionibacterium acnes
  source 1..1504: mol_type = genomic DNA
acgaacgctggcggcgtgcttaacacatgcaagtcgaacggaaaggccctgcttttgtggggtgctcgagtggcgaacgggtgagtaacacgtgagtaacctgcccttgactttgggataacttcaggaaactggggctaataccggataggagctcctgctgcatggtgggggttggaaagtttcggcggttggggatggactcgcggcttatcagcttgttggtggggtagtggcttaccaaggctttgacgggtagccggcctgagagggtgaccggccacattgggactgagatacggcccagactcctacgggaggcagcagtggggaatattgcacaatgggcggaagcctgatgcagcaacgccgcgtgcgggatgacggccttcgggttgtaaaccgctttcgcctgtgacgaagcgtgagtgacggtaatgggtaaagaagcaccggctaactacgtgccagcagccgcagtgatacgtagggtgcgagcgttgtccggatttattgggcgtaaagggctcgtaggtggttgatcgcgtcggaagtgtaatcttggggcttaaccctgagcgtgctttcgatacgggttgacttgaggaaggtaggggagaatggaattcctggtggagcggtggaatgcgcagatatcaggaggaacaccagtggcgaaggcggttctctgggcctttcctgacgctgaggagcgaaagcgtggggagcgaacaggcttagataccctggtagtccacgctgtaaacggtgggtactaggtgtggggtccattccacgggttccgtgccgtagctaacgctttaagtaccccgcctggggagtacggccgcaaggctaaaactcaaaggaattgacggggccccgcacaagcggcggagcatgcggattaattcgatgcaacgcgtagaaccttacctgggtttgacatggatcgggagtgctcagagatgggtgtgcctcttttggggtcggttcacaggtggtgcatggctgtcgtcagctcgtgtcgtgagatgttgggttaagtcccgcaacgagcgcaacccttgttcactgttgccagcacgttatggtggggactcagtggagaccgccggggtcaactcggaggaaggtggggatgacgtcaagtcatcatgccccttatgtccagggcttcacgcatgctacaatggctggtacagagagtggcgagcctgtgagggtgagcgaatctcggaaagccggtctcagttcggattggggtctgcaactcgacctcatgaagtcggagtcgctagtaatcgcagatcagcaacgctgcggtgaatacgttcccggggcttgtacacaccgcccgtcaagtcatgaaagttggtaacacccgaagccggtggcctaaccgttgtgggggagccgtcgaaggtgggactggtgattaggactaagtcgtaacaaggtagccgtaccggaaggtgcggctggatcacctcctttctaagga

SEQ ID NO: 8 - DNA, 1504 bp, Propionibacterium acnes
  source 1..1504: mol_type = genomic DNA
acgaacgctggcggcgtgcttaacacatgcaagtcgaacggaaaggccctgcttttgtggggtgctcgagtggcgaacgggtgagtaacacgtgagtaacctgcccttgactttgggataacttcaggaaactggggctaataccggataggagctcctgctgcatggtgggggttggaaagtttcggcggttggggatggactcgcggcttatcagcttgttggtggggtagtggcttaccaaggctttgacgggtagccggcctgagagggtgaccggccacattgggactgagatacggcccagactcctacgggaggcagcagtggggaatattgcacaatgggcggaagcctgatgcagcaacgccgcgtgcgggatgacggccttcgggttgtaaaccgctttcgcctgtgacgaagcgtgagtgacggtaatgggtaaagaagcaccggctaactacgtgccagcagccgcggtgatacgtagggtgcgagcgttgtccggatttattgggcgtaaagggctcgtaggtggttgatcgcgtcggaagtgtaatcttggggcttaaccctgagcgtgctttcgatacgggttgacttgaggaaggtaggggagaatggaattcctggtggagcggtggaatgcgcagatatcaggaggaacaccagtggcgaaggcggttctctgggcctttcctgacgctgaggagcgaaagcgtggggagcgaacaggcttagataccctggtagtccacgctgtaaacggtgggtactaggtgtggggtccattccacgggttccgtgccgtagctaacgctttaagtaccccgcctggggagtacggccgcaaggctaaaactcaaaggaattgacggggccccgcacaagcggcggagcatgcggattaattcgatgcaacgcgtagaaccttacctgggtttgacatggatcggaagcgctcagagatgggtgtgcctcttttggggtcggttcacaggtggtgcatggctgtcgtcagctcgtgtcgtgagatgttgggttaagtcccgcaacgagcgcaacccttgttcactgttgccagcacgttatggtggggactcagtggagaccgccggggtcaactcggaggaaggtggggatgacgtcaagtcatcatgccccttatgtccagggcttcacgcatgctacaatggctggtacagagagtggcgagcctgtgagggtgagcgaatctcggaaagccggtctcagttcggattggggtctgcaactcgacctcatgaagtcggagtcgctagtaatcgcagatcagcaacgctgcggtgaatacgttcccggggcttgtacacaccgcccgtcaagtcatgaaagttggtaacacccgaagccggtggcctaaccgttgtgggggagccgtcgaaggtgggactggtgattaggactaagtcgtaacaaggtagccgtaccggaaggtgcggctggatcacctcctttctaagga

SEQ ID NO: 9 - DNA, 1504 bp, Propionibacterium acnes
  source 1..1504: mol_type = genomic DNA
acgaacgctggcggcgtgcttaacacatgcaagtcgaacggaaaggccctgcttttgtggggtgctcgagtggcgaacgggtgagtaacacgtgagtaacctgcccttgactttgggataacttcaggaaactggggctaataccggataggagctcctgctgcatggtgggggttggaaagtttcggcggttggggatggactcgcggcttatcagcttgttggtggggtagtggcttaccaaggctttgacgggtagccggcctgagagggtgaccggccacattgggactgagatacggcccagactcctacgggaggcagcagtggggaatattgcacaatgggcggaagcctgatgcagcaacgccgcgtgcgggatgacggccttcgggttgtaaaccgctttcgcctgtgacgaagcgtgagtgacggtaatgggtaaagaagcaccggctaactacgtgccagcagccgcggtgatacgtagggtgcgagcgttgtccggatttattgggcgtaaagggctcgtaggtggttgatcgcgtcggaagtgtaatcttggggcttaaccctgagcgtgctttcgatacgggttgacttgaggaaggtaggggagaatggaattcctggtggagcggtggaatgcgcagatatcaggaggaacaccagtggcgaaggcggttctctgggcctttcctgacgctgaggagcgaaagcgtggggagcgaacaggcttagataccctggtagtccacgctgtaaacggtgggtactaggtgtggggtccattccacgggttccgtgccgtagctaacgctttaagtaccccgcctggggagtacggccgcaaggctaaaactcaaaggaattgacggggccccgcacaagcggcggagcatgcggattaattcgatgcaacgcgtagaaccttacctgggtttgacatggatcgggagtgctcagagatgggtgtgcctcttttggggtcggttcacaggtggtgcatggctgtcgtcagctcgtgtcgtgagatgttgggttaagtcccgcaacgagcgcaacccttgttcactgttgccagcacgttatggtggggactcagtggagaccgccggggtcaactcggaggaaggtggggatgacgtcaagtcatcatgccccttatgtccagggcttcacgcatgctacaatggctggtacagagagtggcgagcctgtaagggtgagcgaatctcggaaagccggtctcagttcggattggggtctgcaactcgacctcatgaagtcggagtcgctagtaatcgcagatcagcaacgctgcggtgaatacgttcccggggcttgtacacaccgcccgtcaagtcatgaaagttggtaacacccgaagccggtggcctaaccgttgtgggggagccgtcgaaggtgggactggtgattaggactaagtcgtaacaaggtagccgtaccggaaggtgcggctggatcacctcctttctaagga

SEQ ID NO: 10 - DNA, 1504 bp, Propionibacterium acnes
  source 1..1504: mol_type = genomic DNA
acgaacgctggcggcgtgcttaacacatgcaagtcgaacggaaaggccctgcttttgtggggtgctcgagtggcgaacgggtgagtaacacgtgagtaacctgcccttgactttgggataacttcaggaaactggggctaataccggataggagctcctgctgcatggtgggggttggaaagtttcggcggttggggatggactcgcggcttatcagcttgttggtggggtagtggcttaccaaggctttgacgggtagccggcctgagagggtgaccggccacattgggactgagatacggcccagactcctacgggaggcagcagtggggaatattgcacaatgggcggaagcctgatgcagcaacgccgcgtgcgggatgacggccttcgggttgtaaaccgctttcgcctgtgacgaagcgtgagtgacggtaatgggtaaagaagcaccggctaactacgtgccagcagccgcggtgatacgtagggtgcgagcgttgcccggatttattgggcgtaaagggctcgtaggtggttgatcgcgtcggaagtgtaatcttggggcttaaccctgagcgtgctttcgatacgggttgacttgaggaaggtaggggagaatggaattcctggtggagcggtggaatgcgcagatatcaggaggaacaccagtggcgaaggcggttctctgggcctttcctgacgctgaggagcgaaagcgtggggagcgaacaggcttagataccctggtagtccacgctgtaaacggtgggtactaggtgtggggtccattccacgggttccgtgccgtagctaacgctttaagtaccccgcctggggagtacggccgcaaggctaaaactcaaaggaattgacggggccccgcacaagcggcggagcatgcggattaattcgatgcaacgcgtagaaccttacctgggtttgacatggatcgggagtgctcagagatgggtgtgcctcttttggggtcggttcacaggtggtgcatgcctgtcgtcagctcgtgtcgtgagatgttgggttaagtcccgcaacgagcgcaacccttgttcactgttgccagcacgttatggtggggactcagtggagaccgccggggtcaactcggaggaaggtggggatgacgtcaagtcatcatgccccttatgtccagggcttcacgcatgctacaatggctggtacagagagtggcgagcctgtgagggtgagcgaatctcggaaagccggtctcagttcggattggggtctgcaactcgacctcatgaagtcggagtcgctagtaatcgcagatcagcaacgctgcggtgaatacgttcccggggcttgtacacaccgcccgtcaagtcatgaaagttggtaacacccgaagccggtggcctaaccgttgtgggggagccgtcgaaggtgggactggtgattaggactaagtcgtaacaaggtagccgtaccggaaggtgcggctggatcacctcctttctaagga

SEQ ID NO: 11 - DNA, 20 bp, synthetic construct
  source 1..20: mol_type = other DNA
ggtatccaccgagatggaag

SEQ ID NO: 12 - DNA, 20 bp, synthetic construct
  source 1..20: mol_type = other DNA
gtggtcccaggtgacattct

SEQ ID NO: 13 - DNA, 20 bp, synthetic construct
  source 1..20: mol_type = other DNA
cgacatcgacgtttcatctg

SEQ ID NO: 14 - DNA, 20 bp, synthetic construct
  source 1..20: mol_type = other DNA
gtgttctcctcgtgctggtt

SEQ ID NO: 15 - DNA, 21 bp, synthetic construct
  source 1..21: mol_type = other DNA
gataatccgttcgacaagctg

SEQ ID NO: 16 - DNA, 19 bp, synthetic construct
  source 1..19: mol_type = other DNA
acccaccacgatgatgttt

SEQ ID NO: 17 - DNA, 21 bp, synthetic construct
  source 1..21: mol_type = other DNA
gaagaatcccgctccatttcc

SEQ ID NO: 18 - DNA, 20 bp, synthetic construct
  source 1..20: mol_type = other DNA
cctttcttgtagccgagcag

SEQ ID NO: 19 - DNA, 16 bp, synthetic construct
  source 1..16: mol_type = other DNA
tgggaccaccgtaaac

SEQ ID NO: 20 - DNA, 20 bp, synthetic construct
  source 1..20: mol_type = other DNA
cgtgatcctgatcgactgtg

SEQ ID NO: 21 - DNA, 19 bp, synthetic construct
  source 1..19: mol_type = other DNA
gctccacaacttcgagtgc

SEQ ID NO: 22 - DNA, 22 bp, synthetic construct
  source 1..22: mol_type = other DNA
caggccgttgatcgtgagctga

SEQ ID NO: 23 - DNA, 20 bp, synthetic construct
  source 1..20: mol_type = other DNA
tgctgataatccgttcgaca

SEQ ID NO: 24 - DNA, 20 bp, synthetic construct
  source 1..20: mol_type = other DNA
acgacgtcgaaaacaactcc

SEQ ID NO: 25 - DNA, 14 bp, synthetic construct
  source 1..14: mol_type = other DNA
agctcttgccgcat

SEQ ID NO: 26 - DNA, 19 bp, synthetic construct
  source 1..19: mol_type = other DNA
atcgccgtcgacaggtagt

SEQ ID NO: 27 - DNA, 19 bp, synthetic construct
  source 1..19: mol_type = other DNA
ccgagattctgcgcctagt

SEQ ID NO: 28 - DNA, 21 bp, synthetic construct
  source 1..21: mol_type = other DNA
cggtgcccttgctgaggtaca

SEQ ID NO: 29 - DNA, 6363 bp, Propionibacterium acnes
  source 1..6363: mol_type = genomic DNA
gtgttgtggactctcggggtcagtctgtccgctcacttgagatggcttaacatttctgaccgacgccgaagtctacgaacgctgcgaaacgccaaccgacgcctttgtaaccaagccttcttcatcaagatctacatcgacgaagacgaccaactccgcgtcgagaacaaccgacctttcgaaatgctcctcgaccctcagatcaacgccaacgccctcacctgggcccagaacggcaacaaggcccgaatcgaaactaaggggttcgagccttgtgcgtggggttacttagacgttcattttgatacaaggatctgggtgggtgcacggaggggctaggtgggtgcattgcatcctgacaggagcgccgggtgagttctggttgactaccagcagcgtgttcggtatgctagaggatagttacgcgacagcgtccgttccaatttctgggagtgtgttaattccgatggtgctgtgatctccgttcggctacgccgagaagcgtccaaatgtttcgacggttttggggatcaatatgtctgctatcgaggtaatcaatctttctttttcattttccgctcagccactcttggataacgtttcattcagcgttggcgatagcgagcgcgcagtacttgtggggcctaatggctctggcaaaaccactctcctgcgcctgatacgaggagagctaaccccggatcgaggacatatcgccatcagtgatgcaggagatgcaggttcttgtcgcttcccttatgttcgtgacgccactggcacagttcaggactatctggacgacgtgttggctggcccatgggagttgctcactcgcttcgaccacgtgacgaagcaactatcggctgcccaaagttcagcgagtctcgctaaagagtacgatcacatactcaccagtcttactctggccgacgtatggtcgctcgaagctcgaatcgatgaagtgttagccggtttaggtctaggccagctgaccggacgcggtcgacagcgcgcactcggctcactctcccctggccaggcagtgcggctcgaactggcaggcatcattatggtcagaccagtaactctggtcttggatgaacccaccaatcatcttgatgacgaagccgtaggctttctgatccagcaaataacagattggccggggccagtgctcatggccagtcataatcgtgcgtttattgaagagacagccacggtcatctatgacctcgatattgccccgtggcaggctttggccacagctgaaggagaggctgtgtctggcgtgtaccggtgcactggcgcctatagtgattatcttggcgccaaacaacacgcccgcatggagcatcaaaagcttcacgccacccagcaatctgaaaaacgcgcgattcgaagtcatcgccgtcgtagcgaagatatcgctcgtggtggagtgaaattagcgaaggcgcagggcatggcacgtaagttcttctctgaccgggcagaaaagaccgcgctgcgacgcacgcgtaacgacgatcaacgcttacacgatcttgctgaacatgaggtgcgaaaaccccgcaactaccaacttaagctcaaccttccaccagtcggctcgcgtggcgggttagccgtcacggcacgaagcgccttcattccaggcaggcttctcccaatcacgttcgaccttgccacgggggaacatttaatactgactggcccgaatggagcggggaaaaccacgctcttgaattggcttgctagtgggaaaacaacaatcgaccctagatccgaagccagcggcactatctctgtcagcgggcggcttgcttacgtcccacagcgcctaccacgcacaggagattcctactttcacccagaacattggaaagacgggatcagagaacttggcacgggaatactccacccatccatgtgggccaccccagtcggccaactttcagatggaaaccagcgtcgagcccagatcgcgttagccgtggcgcagaaacccgagattcttgtcattgacgaaccaaccaactacctcgacctcgccacgcttgaagaactagaggacgcgctacgccaatggaacggcacactcatcatcgccagtcacgaccgctggcttatcaaccactggcagggaacacaaatcgaattatgccccacagatccagcgcccggatcaccgaatcccctcttactcgttaagagccggttcgagccgtggtagtgccgtccttgagtgtgagtttgatagcgccgtcgtggttgacggtggtgtgatcgacgagggtgttccaggcttggtcggagtattcgagtggtggttgggtggcaaggtagtcgcgtacttcgattgcttgtgctcggcggtggcgcagatcgtcgatctggtcgctgatccgttgatgctcggcctcaagttggtggtgccgatcttcaagctcgtggtaacggcggtcgtagtcgtcagggtcgtgggcggtcgtggctgcggggtgatgagttggttcatcagcgtgatggtttcttcgatccgctcccccagcgtggcctgcttggtttcgagctcgcgggtgtcgtagacggtttcgtcgagcaggcgcatggtgtcatcgagcacgtcgttgccggtgacccgcttagccagggctgcgacgaaggcgtctttgatctggtcttcggtgacgtggggtgtcgcgcagtgatgatccttgttgtatttgttgttgcagcgccagatgtagcggcggtatttgctggtggagtgccagactttccgcccaaacctcccgccgcaatcggagcaggtgatcgtgttggcgaaggggtgggtgttggaggtgcctttgcctgcgcggcgggcgagttctgcttggacggtgtcccaggtgacgggatcaatgatgggttcgtggttgctggtgacgtagtactggggtacttcgccttcgttgattttcatggtttggttaggaagtcggtggtgaagctcttttgcagcagcgcgtcgcctttgtatttctcgttggcaaggatcgaccgcacagtggagggcgaccagatttgtttgccacgcggggtggggatgccatcggatgtgaattctttggcgatggtttgtggggttgcgccttcgaggaagcgggcataaatacgacggacggttggtgcttgggtttcgtcgatggcgaggttgccgtcttcgcctttcttgtagccgagcagggacgcgtaggacaccatgattttcccgtcggcgaagcgtttacggtggtcccaggtgacattctcggaaatggagcgggattcttcttgggtgaggctggacatgatggtgatgagtagttcgcctttggaatcgagtgtccagatgttttctttttcgaagtagacctctacgcctttgtctttgagctggcggacgtggatgagggtgtcgacggtgttgcgggcgaaccgggacacgctcttggtgaggatcaaatcgatttttccggcgagggtgtcggcgatcatggttttgaagccttcacggtgtttggtgctggtgccagtgatgccttcgtcggcgtacatgcctgcgaattcccactctgtgcgggattggatgtggctcgtgtagtagtcgatttgtgcctcgtaggaggaggcttgttcttccatctcggtggatacccgcgcgtaggccgctaccctgcgccgacgccgagtaccctgcaccgtggtgtgtccgggtatttttgtggctgggatcgcggtgacacgcttgttccgaatctgcttggtggtcatatcgcactttcctcgtccaggctcaccgccactggcacttcgccgctaatggtgtggatggtgagcgtacgatcgggattgacaacgattttcacgaggcgcgtcagcgcatactcgtcgtcccagtcgtcgaggccaagcacgcgggtgcagatctgggtgagatgggtttctcggatttgtggtgcctggcagggattgcctttacctttggtggcggtttcgcaccaccaaaacttgtaggacgtgtggcggcgtgtcttggtgcggcggtgataaaacctgctacagacagagcattcaatccgagaggtgagcccggtcgttctagctgacggcgtggctccacgtccgagatgtctgcgccgggcgagctcggcctggacggcgccgaacgtggtctggtcgatgatgggcgggtgggattcgtcgacgaggtagcgtggcagctcgccggtgttggtatggcagttcaattctgcaacgtttggccggtaatacttttgcaggattacgcggccggtgtagatttcattttcgagccatttgcggatcgtcttaccgcgaaacttggctccccgcctaggcttgaccccttcagcattcaactgactgatgatcttggcttcagtctcgatgatagccaagtcactacccacgtattggtagccgtagggttggcgcgaatgcatgagcccgtcggcgtatttcttccttatcccccatttaacattcttcgacatggatcgagattcctcctgcgcaaacgatgccagcagggtcagcaggagttcaccgtcagcggtcgcggtatcgatctgttcacgctcgaaacgcactgagacgccgaggattttgagttcgcggacggcatcgagcaggtcgacggtgttgcgagtcagcctggatatcgacttcgtcaaaatcatgtcgatgtcgccggagcgggcggcggccatcatggtctggaacccctctcgacggacggtactggtgccggtgatgccttcgtcgatgaacacgcctgcatagtcccaaccaggggtggattgaatcagatgagagtagtacgacacctgggcggcaatcgaagatagctggcgttcgtgctcggtcgatacccgcgcataccctgctactcgtagccgacgtggcgtggcgggtctaggtgggataactcgaaaactacgcgaggtcactccctgcttctctttcttctatggcgacaggtgttttggttgtatccatctacgctctaaacctgagtcttatccagtcgaacctgcagcaacaatgcccccactggcgcggttgcttcatgcccgatccgcgtaaggatcacgtggctttcgtttggggtgagtgcgccggtttcggtgagccgatcaataaaggcgacctggcgggcaagatcgacttcggcattgaacatggcacccgtcacggtctgccacctcgggtgctgaagcggtgcctgatatagcaggcatgcgagcaatacttacggtgcttgtttccgtaggcctcgaagctctcaccgcaagcaacgcaggtgaaggtgtatattgcccgccggttgagccgttcggggtgggcgtgctaccacgacaaacgacacacatccgaacagaacctttgccccgccaccgcagcttcaaaatgcccattacagtgttcgcatgccttagcaggctcaacatcaaccgccggatcgatgttgatgtcagctctgcgacagatcgacttcaccgtattgcgcgacatgcccaatctggtggcgatctgcccatacgatgcgcctcggcatcgcagctccacaactcgctcacgggtaatctcacgtgccatgacgcgctcctgctcaatagaaataaggtctctactgacagggcttcgacccaccccgatttataaccaccactgtcctggtgcgatgggaacaaaaatggccccgccaccacctcatgtagtgaggcagcgacggggcgaaacaggacagttttcatgagtcttggtttagtggcggagtttttcgttgacccggcgctggacggcgtcgtagttggatccgagtctgcgtcggcgttcgttgccgttgccgtattcgccgcggatgaccgcgtcagcgagcgcgtcaatgttcggtgccggcttcggtgtgggtgcgggtttcggtgccggcgcgggtgcgggcgtgttgccggtcatgtggtcgtaccagtactgggcgcgagccatataggcggcgtgctgagtaccggccagcgatgctgggcattcggtggctgagaagtttttgtgcccgaacacgttcttaccccaggtagggcggccgagcttgtaataccgacagatcgcggccaccaaatgtgcgccgttgtcgaggcaggcgtcagagattttccatgggttagaagaggcgtcggcgtgctcgataccaatgctggtggtattggctgcccagtttccggcgtgccaggcggtgtcgcggtcccacacgagctgcccgatccgcccggaggtttctacctggtagtgggcggaggcgggccgggtctgccacac

SEQ ID NO: 30 - DNA, 20725 bp, Propionibacterium acnes
  source 1..20725: mol_type = genomic DNA
gtgttccagtgcctcgcgggcgtgatgttcttcttcggcaccttcttgccacatgcttcgcgcttcagcctcgccatccaagcgaacctggactgtgaacgagtcctcatcgggtccgtcctcattccacgcggcaatgatcccacgggcctcgtctgcgacctgactcaacttcatcgcctgcccgacagccccgagagccggaatctcgaacacccagatattcgcctcagccgagacctcacgatgggcgatcacttcgtaggtcgtctcaccttctactgtcgtgtccattacttccactccttcggaattttcacgcctgctcgctccagctgtgccaggacaccaactgacgtcagctggtgtcctgctggtatcgatacgcgcccggctccgccggggcgtccccagatttcatggcttcccttggcgttccgcagacgggcccatccttgagaacggagcagcttgaggacgtccttagttttctgcggtttcacacatcatagtatagccccacttaacttgtaaactaagcccctgtttacattttagttggtgcatgtgatccctgctcttatgacgtcgcccgacctggcgccttagacatgcactgttcatcctcaaccacactcaccgtcacgggtccgaaggcgaggtctatcaccattcgcatcgatgaagttgaagcaggatcgtccgcatcacgcactgccgatccggacagacgccaccggccgtaccgactgtttacgatctgccaccgcagactgctgccataaccgctatcacctctgatagtacgtttagtactatcagaggtgattcaagattctcctgtcgagcagccctacagtcacgaagtcctgcgatcgtcatcgcttaaggcagacggatggccatcggggaccactcgcaaagcaggggcgatcagcaacagtgatgtgccatgagcaagtactggtgcaccggctgtttactccgcccctagataaaccacgggtgcaggggtggacaccacaccatgaccgatgtggtgcccaccccatggctcacaggcaggccctatcgccgggagcactgctgcagatgaggctcagtaacctgccatgtctcacctggggccaaggtgccaagctccccacggaatctcaggcatcggaaaccagcagccgaacttccacagcatgagcgccctacgaaaaagcaggccgccgacggttctcaagaactcgccggcggcctgcatcgccactcgaactgtaaccgtggtccgaccccgtgcacaggtaagctccacactcccaccaggcatggccgaggcagtaccaagttgccgtggcccatcggcagatttggttaaattttgaaaagtcatatagactccttctgtaaatttttaaatctcataggactctcgccatcgccagccagcttcgacaggagtcccgatgtttcaccgagtgaaatatcggcaccgtttgagttgacctaaagctcaaaagatgctagaatccatcttacctcgttaggggcgttttgtcaaacgcccctatattgcgtgtcttcgcgcgtcgtagcgctgatgctgcgcctgtgtcgactatccgtttgtaagtactttcgatgacaccagcagtggctactcatgactggtgcgtgcgggtctaaagcagcagggaaaggaatcgcagtagaagccgcttgattcctatcacccctgatggtactatcagtactaacagagcagggcttactcgatgcgtgagaatcggggacatgctgagcctctcgtaggtcattggcctgctgggcgtcagtgtggcgcggttcgatccagtgaactctatcagctctgttagtactgtcagagttgatatattcgaccccaggaggagcccatgagttacatcgttcgcaccggaaatttggtcgacacccccgagctgcgtgagggagagcatggcccgtacacctacgctcgcgtcatcgtgtccgatcgcattcgccaggaggacggcagctacgtcaacgggccagcgatcgcctacgacgtcttggcgggtggcagccaagccgtgaatctggttgaagccgccaaggcgagcggcaacatccgcatcatgttcgcgggccgttaccgcgtcaccgagtggcggggtgagcagggcactcgtatccagcatgaggtccgagccgacgaagtgagcgtgagcctgctcggtcagagggtgaccgtggagcggcctcgaggtgacgtggcatccaaggagagcacgtcgttctgattgagtccgggggcacggtggtcgccgtggtaaaccgtgcccctgacagtactattgacactattggaggtatcagtgtgactgctcaaattttcgccttgtgcaaccagaagggtggcgtcggaaagtcgacatcgacgtttcatctggcccgtgccgcggtgttgcgtggccagcgtgtgcttgtcgtcgacaacgacccccagggcaacctgacgtctgtcgcggccgccgagcccgtgggggaggatcaggcggggctggccgatgtgctcagcgcgcgtgctccagagaccctccgcgatgtgatcgtgccgggaatctggtctggcctcgatgtcgtgccgacgtctggcatcacgctcggctgggtgcgtgacgaactcgtgatcgccggtgccggccgagaaggccggctgcgggaggccctggccggcgtcgaggacgactacgacgtgatcctgatcgactgtgctccatcgctcgatcagctcacgatcaacggcctggtggccgcccagggtgtcatcgtcgtgacgcactcgaagttgtggagcgccaacggcctcgcccagctgctcgacaccatcgacagcgtgcgcagctactacaacggcgcgctgcgcgtggcgggcatcatcgtcaaccagcacgaggagaacaccatcagcgggaaaacctggctcgacgagctgcatcaggctgccgagtcccggaagctgaccgtgcttgacccgccgatccccaagcgtgtcgtcatcgccgataccgtcgaggccgcgcgcggtctcgacgagtggggaagtgccgaggcggccgcgctcggccagttgtacgcccaccacctgacctgcatcgaaggagccctgtgatgacccgtccagccccccgaaagtcctcattgagcggatcaactccggtcgccccgccggctcagacggcgccggcaccgtctgccgcacctaccccccacaaggccgatgagtcacagacgagcagcaccacgaggaagtggcggcacaaggtgtcgttctaccaggacccggccgacaccgaccgggtgcgcggggcgatcctttacacgatgacgaccgagggcaaccggaacctgagccagttcgtcaacgatgccgtcatggccaaggtggtcgagctggaagtcaagtacaacgatggccagccattccccgctgtgggagcccgaggactaccccagggcggtgcagccgccgccggtgagtagaggaccatcgaccgtcgggggcttcaccatgcccccgaccctcggtcatcctgatcctcttgtcgatggtggtgacagtgggggattcacgcctcgttcagatcagaggaagtctcaccgcgtgattagtactatcaaatctgacagtactaacagagcagatagggttccctaggtcgagctgtatcacgccgacaaccagtgagccagtgatctacgaggggcgcaatatgcacccgatcggtagccgcgaaggcctcgccctgccccgatagtactatcaccactatcaatggtgctagtggtgagtttcttccattgatgacaacagcacagtgctgccgtctgtgtgcgggccaccagcccgcacacagttgccgtcgaggacgttgttcatgctctgtggtggccggtcctgagggcggctcgcaggatctcccggcgctcacggcgacgagcctggtagccaaggtctgcatgttcggcggcgagacgggctttgagggttgcggcttctgcacggcggtggagttggtcgtcgatgagttgggcgcgggccagacgccgcttatgggggttgtcgtgggtgaggggggcgtcgaggctgccgtcgtgggttagggccagggctgctcgttcggcgtcgtcgaggccgatgtggtggacggtcacgggtgcggtggtgacgtcgaggatgtccaggtggatgttgtggccgccgccgggggcttcggggaagtctggtgggctggcctggccggtgtcggggtcataccaggacaggccgatgatctcggcccagggtgggggcgggcagacggctcgcagaagggtgtgggccaggaacgtgttgcgggccatgatgcctccaagggtgaaaagcagtcgagtagcgatgacggcggggtagccgtctgctgggctgaggccgaccgggcccatgtcctcgatgctcttgtgctgcggccataccccaaagctaccaaacagtctttttaatctcaaagatacaaacagtgcttgacatattatctgcagcgaaagatactttcatcatggtggctgatcatgattacgcgactcctgacgatgagtggatgacacctcctcaggtggcccgtgtgattccgaacaccactgctcaggctgtccggcgctgggctgaggagggtcagcttcctggggcgtttcgtactccttctgggcgttggcatattccgtggtcggctgtggtgggcatcatggggtttgatccgcgtgagtccgcatcaccgagtgatcgtcaccagagctgacagagtcgtcgatgagctttcgagtgcagagctgatggcacgacggtctggatacttgtggagatgagagacgaccacatccagtcatggtcggggtacaccgaggggcagattcagcagtgctggcacgatgaggttgcccctgccattgactcgctcatggagcaggtaaggtctgttgccgagactcctgtgccgccgggttcgagattttacggcgatgagcagtgggccaagccttttcatccgtctactgcgatctgcggttcaatgggtccgccagcgatcacttgcacgcgctgaagctcctcgtctgggaagcgaacgtccaccatgtctatgcgccgtacacccttgctcgtgcatctattgaggcatcgtctactgctgtgtggctgttgagcacgaagacgcgcggagaacgtgtgctgcgagccttgcgatggtacgcgcaggattgtcacgactcgtgcaggttcatggatgatgagcagtatcgtgaccacctattgcggcgcattgaggggactgtcgctgcgggaaatctcgactcgcgcgctgctaggaaacggtaccgtgcaaccgatgttgtcgatgaggctgatcagctggttcccggaactctgagggcgtggcgagctttttctggtatggcccattcccgtatgtgggcatccagggggctgctcgacatggaagtgctgtccagtggccaaggaatggttacggcgaaggtgacgagcggatcggcccaaatcctttgggccgtcgtggcagctctgaatgttgctctcagtgccgctcgcttgtggcgtgattcgatgtgctcaccgtttgctgttgcccagtcggtagacgcgatgccagaggcgtttcgccgccctgtttagggtctgatcggggtagtgggtgttcacggggtcccaggttggccatggggcggcttggtgatgtgagttgggttgtgtggcagcctgggtgttgggtgtggcttcgttggccacgaaggcatgctcttccttgtgctgggacttgagtccccagtgctctcccctttgctagtggggggtggggtccccggaggtaggtcctccggggactttttctatgtctgtccgtgccccaggatttcgtatctaggcagtaccaattttgggttagttggaggtttctttggtaatggacagggtgagggtgatgaagaggtggccgtccttggtggcagaaattttctcgaacttcagctgaatgttgttatcagccactatctgttgggcggtgaggtgctcggagagcttctggaatccttcgcggatccacaggttgtaggggttggtgaccgagaccgaagggtatgggtcgaccttcagcgtcaggactggctggtctgggttgagggagttgatcttcaccagtttggggtaccggtcgcactcatgtgtctcttgtgttgggggccagcagtcgggggcccattcctcccagtggtcacgcatctcacgaagtactttcctgcatctcagcctctgcaggagctcgcgcgccaccgatgggagggctgccatgatgagggcaaggactgcgaacccgatgatgtaattgaccgtgtccctcgtcacgccgttcttgccgaggattccgatggcgaacgcgatgacgacaccgcccaggcacaggtgcatggggtcatgctgtgatggtttttcttcttcagcgactggtggggctatagtcatgtgtgccccttagtactaagtgatactggtgggttgcttttccccggtggccgtgtgcaagacggccaccggggttttccttcatgttcctgattttatctgcccggtgtggcgttttcatctttgtgtgggtggttcgcctggggtcttggagtgtggtgacgcggtgatggtcacggtgacggtgactgtggcgcgtggcgggtgaggtggttctttcctggtctggtgtgtggcccaggtgagtgtggtgatgagggccagggtgaggatgatgaccagggtggggagtagtttgtctggccggtgtcgccgggcttggtggcgcggcatgtttttccagggtgtgtctccgaacaggtcgtcgtcggaggggtcgtcgtggttcatagggtggccttggcgatggtggtgggcgagtttggtccaggtgatggtgccgtcggaggcgatgtggcggtcggcgggcagggtgtggacggtccatccggcgtcggtgagggcggtggtgaaggatttcttgatggatcgtttgggtaggtcgatgggggcgtgggtgccgacccagatgcaccggtttttgaggtgggtggcgccgaggtggttcatgtcgcggaccatgttttgggtgagtgtgagggtgtcggggtcccattggacggggatgatgatgtggtctgcgatggtgatggcgtgttgccaggcggcgtcgaggtcgttgtttccggtgtcgaggatgatgacgtggaagcggcttcttagggcggtgatgatgcggtcgaggtcgtcggcggtggggggtgtgatgaggctgttgtggttgtcggtgatggtgggtaggcatgtgatggtggcccagccttctggttgccaggagatgtaggggccgaggtcgcggggttgggaggcgaatcctgggtgacgggctgcgcgggcgaggtcgatgacggtgttgtcggtgtggcggggtgcgcgggtggagagggtgccgcgtgggttgatttccacgacgacgatgtcgtcgtgtcctgctgtggtggcgagggcttgggcaaggatgacggccagcggggttttgccggtgccgcctttgaggttggcgagggtgatgatgtggtcggtgagttgggcgggtgcggcggtgtggtgagggttggcggtgaggttggcgatggtgaacagggcatcgagatcgtcggtggtgttctgctcggtgggttgggggtcgccggagatgatcgggtcggcgcggcgcggctgccatgccggcctcaccactgtcacgaccaccacgggtctgctggcgctgtgtgggtgtcgtcggcgatgactcacgatcggcagtctcaccatcgtctcggtgatgctcggctagcgctggacccggtcaagttcgggccggctcacccagtggtgatgactcggtcacagaaccgctgccggtcgttatctcggacgtctcgactcctccagtcctgatgggcgttggagccacctacacctactctcagaacgaccccgacctcgtgtggggcgggggcagatgtcacttgggccaatcgagagcccaggtgatggggaaagcaggggtgtgatatctgtcctggaaaactgggcagctgctaccgtggattgacggatctccacgaaagaagggaatgcgaccatgcagatcaccgtcaagaccatcaaagatcatcgggttcgcactgtccagaccgccatgagcagcgccttggggattggttcccaggtagacatgctcgcccccggcggttccaccagctcgagttccggttcatgctgctcgtgctcgacctgcgcggtagtggcgcagcctcaagactgaacggctggtcagccccaggggcgtggcgctcatcgcgtcacgccccttctattcgctggacagggtgcgcgagctgaggaacatcgcggtgtgtgcgatgacgaggggcaggagcaagtctgtgcgggttgccaagtagccctgcgcgatggccatcacgctggccccgacggcggcgaagacacctccgatacgtcgcttcatgccgccgaattgcatcaggacgaataggactcccgcggtccacatccctccgggcatgcatctgggaaagatgaaccggaagatgatctcttcacaggagagctggagtactagcagcgtagcccccacggggagactcacctctactgacagacggatcgtcttcatccacccacccgagctggcatcgaccatttcggtggccatgcgcgaccggtggcctcgtgcctctcgctgcgtgtcgatccagccgagcagtccgtggacgctctccgctaggactcctgacgcgacagtctcaccaattcctaagcccacggcgaggaccgcgacgcccccctgcacggcaggctgtgtgacttggtggtcccaccaacccgccggcaggaccatgcgtgcgaggctgcacacgagcaggaggtggagggtcacgacgagcgacatctggaataccgcttgccgttcggcgatggtggcgttgggaaagagcggtaggccggcacgggcagcggcgctcgacagcttccgcaagagcggtttggagacgaagtagtaggcgacgtacagcgccagcgctgtcgcgatgatgatcatcggtctgccaccgagctgacccgccgatagccgtttctgttccaccaatactggctgttgtagatcaggtggcccagaacacaggcccagatcccccagaagatgaacaggatagtccccaaggcggcgagcgggatcttggagaggacctgtccccgtccgaacaccgagtggccgcaagcaaacaagagtgctcccacagcggtgagcgcgagccaggccggggttgctcgcagactgatcaccgggaccccgacccggaagccgacctcttctcctacagcgatgactagcaactgccacagcggcatgttctgaacggagcgcgcgactcgggctcgagtcacccacacgggctgttgagcgctcacatcaccactcaggtaccccggtgaggcacttcgcttagtactggggcccgatgtgcgagcattcgtgatgtgtcgcaggatccggttgtcaagccaagaggccagcagggctccggcgacagtgacgggtagcccgatcagcacgaggccccagccatgcggtgccgagaggtttctggccggcgtgcacgcgaggcaggcaaatgccatcactgccagcactacgacgtagatggtcgcataattcgacttgcgggtgacgttgccgaccatcttggccaaagtcgctggggaccagctgatgagtgcgatggtggtcagcaggaagcaggaccagacagacatccggcgcactcaggggtatgggtgcggctgtgggttttggaaaccgccatatgcggcgtagcgggggtgtgcccgcatgggtgcgctgggcagtgacagggcgagcagcccaggcgcccagagcctgacacagtgcagtcccagcccctggatctctatggtggtgaaatcttcgatgtacaggggtgacacacaggtgatgctgttgaccacgctctttaccagttccgcccccgtgtgggtgtcgtcaggtggcaggtcttcggcttgggcaatggtgcccgcgtcgaatttcgccacaactgattgcgcggcctgatagttcctcgcgtagtaggagacgttcgagtcgaggtcaagcatgtcctccgtggacatactggacgcgtcggcctcggcgtcgaaagacgtccataccgcgagcatccgaaccccgctgcactcgagaaacgccttgtacatggctgcttccagacccgcgtctgcacctaggccgacggcgacgaggggaagttggttgccactaccgaccatcatgcatgccacggtgaaatgcttgagcccgggagtcggaagccagtagaaacgcagttcgtggcttcggcccgctgcacgttccacgagccgctggatgcgctggaggcggggtccttcgacgcggatgcgcacaggtgacgaggctccataccacaggcccatcgcggcatctacctggatcaattcataagccgcggacagcgttgcggcgacgcgtgaagtgtggacggcggtgccggtcgtcacggccgttcccagccacggctcaccgtcgtgccgacgggggttgtaacccaggtaaaagaactgcgccgggatccactcctgccgggaggtcccgacacggggagtcttgacccatgtcatgggcaagtcgtcgcgataggtgtcgaacgcacctccagccactcgttgcgcgaagccgaatgcgcccagatcgagaacttcgtcctcggtccgggcgaggagttcctgacgagtcgcccagcgccgttcgaagggactatggagaatcccggtacccgcgcagtagcgctcgacggcctccgcgtagaccttgatctctgcctcaaactcgttcagccccaccccaccgatgtggtagctacccggcttggggtcgggccggtcaagcagtgcgtgcatccccgtgagttccccaccgttcacccgcacgcgggggccgagcgcggggtgcagcgagtagccgacggaagtcaccagcccgcatagcgggctgtaggtgcgccgcctgagccgggctgcggtctcgacggggtcgctatcctggcgaagcttcatcgctcgccccctgccgccagccactcacggatgtcgtagtacaggtccggagcggtttcaacctgcgctggtgcatcaaaacgggacataggtaggacgtcgttgtaggcgatctccatcgtcggtatgtagaccgacaacactttgttgcgcgtcgtgttgaggccgttgcgggcgatgctgacagcctcatgcgcgacgtgcgcggccaagatcgcgcgcaccgacgctgccacggccggcgctccggcccttacgcggtcggcagcggccacccgcatccaggacaggtagctctgccgttcgcgcaggttcatcgcgacccgctgctcgaaggtccggtaggacgaggtcgcaccagggacgacgtagggacccacgtacaaggccggcccgtctacagctgcgtggagccacgacaggtgggcgcgtcgggcgaacaggtcaagggcgcgcagcatagccgggttgttctgcgccagcgctaccacaaggagtggctgcaggtccggcgccgaacccagcaacgccaacatctgggaggcctcctgctccatgtgcaactcgtcggccgactgctcaagccgcaggcctgcgaagagggtggctgatggctgcgtgtcgtcagcgaggacggtagcctgcagcccctctccctcgagaatctgctggatatcgccggcgaggagcgcgtcgtcgctgaatacccacaccgggcgcgtctctctacctccatccatcttgtcctcaacgttttcgaccagcgcaccgatcgatgctaggtgggccatcacgtcgtcaagggccgcgcgggtcaatccgggcacccgggacacgatctcgggcggctgcagtccttggctcaacaagtccaaggccggccacagggtcccggtggcgtcgtcgtcctccagcgttgtgctctcggcgttccagacgcctcgacggaactccaccctgtccatcgagtaaggcaccatcatgaggcccggtgaaatgtggttggtcactttggctcctgtacagcctaggcttggacgcccacggtcatggtgtgggtcgcggtttggaaaatcccgtcgaggttgagtgcctgattgagttcgtcctcgtagaagcttgaggactcgactgaggcaagaccgagccccgtgcagaccaagttgatctgttgtgcgatcgccccgacttcttgaagggcgaacctcaaacccctggctccgtacttccgcatcgccctccacggcgagatgacgaacaccaagtgcactccggccgcatccgattgctccacggccggctcgccggccatcgaattcctcacgccgcgacagccctcttcaccggtcacgggcaccagtcgatcgatgaccggcgagtagcggtagacgccgcgactcaagccggacacccgttgtgcggacatgaagatagacacgggatacagccctccaccagacgggacagcgcgtacattataccgcacgatatcaccgctcgaacgtgggacatccacgtgccccgtcacaccggcagcacctctcagaaacgcagctacgtcacgcaggtctagggattcgccggtgtagttccgtccgctgcgccggcgggcgatcacttgctcgaggggtgcgcgcaccctgctggacctgggaagttcgatcacatcggcagcgaacgtgtcgcgatccatctgtccgtacgtaacgatcatggggtcaacgaaatagtcgccgaccgagacgttgaactccatatccccccgggcgatgcgcgaggcgagcaagaagtctgcagctgcgttagacagccccggcccatcagtgttgtcgcagcggaactcgtgggtccgaaaccccacaccttccgtgcccgggctctgcgctcgatacgacgtgatcgcagaactagccttccttaaaccgcccggagtagctaccatgaccgtcccctctgaggtctcccgaacacttgcgacaatagcagcatgtgggggcagccgccagaggcgggcatccttgtctcgacaaccattgacctccggattcgatatgtgcataatcatagtcgtgccaacacgaaacgtgtacgtctcggaagacgacctagacctgttcgccgaagccaccgagatcgctggaggcctgtccgcagcggtgttggaggccttgcgcagctacgtagacaggcaccatcgcgcggccggcggattcgacgagatcgagctggagctgcagaacgacggtatcgaccaccgtgtcaccttcatgggtcgccgcctgatacacatccgccgtccagatcccgagggaacccgcatagacactgtctacttgaccgccaaacaccaattcgccgttgccaccaaaatccaacgacggctgccagactggacggccggccacgagcacatctggtccgacccggagacctggaatcgggagttctggatcgcaggtgacaagacgatggccgtgtatcccagccttgacaaactccgcgaagctgaccccaatgtggccgaacgcgccgaggccgcggtcaaaatcccgccgttcgaggtcctggacatctgatgacagaatcatcatcttcccggcggcaattggcaatgccggtgctgtcagtcacggatctagccaagaaatacgtggttcatggcggctacgaggtcccggcactcaacggtgtctcgtttgacctgcacccgggagagatgctgggtttgttcgggccaaacggtgctggaaagacgacgctggtcaggatcatcgcgggcctcttatcggcagattctggagacgtccactggggatcggatcaaggtcgggccaggttaggctacgtgtcccaaaagggtggactgcagtacgggctcacgtgccgggaagagatggtcttccacgcacaatgcttcggccagtccgccaagcaggcccggactagcgtcgacgaggtcgccgcgatgctgcactgcgattacctgatggagtgggacgtcggaaggctctccggtgggcaacgccgaatcatcgaggtagggctagcactcgtcaatcaaccatcggtcgtcctgctcgacgagcccaccctgggcctggaccccgcaacacgcctgtcgttgtggcaaacggtaaagtcggcacgccgtgagaccggtgctgccttcctcgtcaccacccactacattgacgaggtggccgagcacctgtccaacgtcagcgtgatcaaccacggaaccgtcgtcgccaacggctcgccagcgcacatccgagaaatgttcgcgaccggggaagtaacgctcggcgtggccgaggatacggtggacagtgcggtggacgtgttggctgggaccgcgttcgaggcgcaccccaccgaaaccgtcccggggatcgtggtcaggtccaggcatcccgacgtggacgcggccaagatcatcaccatcctggctggtcatggcatctcggtggactccatatccgtacgcgaggcgaccttggaagaggcgtttctcacgatcacaggcagtcgagacccggagaggcaaatcccatgaacacttgcttcaggcgatatgcggcgatgtcgctgagagcgcggcgtgatttggccctgacattcatccagcccctcgtctacctagccctcttcggaccgctcttcgtcacgacgatgaagatgtcgcagagagctaccgccgctacgggttactccctatacatcacgggcctgtccatccaaatggccatgacgatcggtgccttcgcggggctaaccatcatcctcgaataccgactcggcatcctcgaacggatctggagcacccccctcacggggagcaagatgatggcggggcgaatcgcgcgcgacgtcgttatgatgatgatgccgatactggtcgtcttcatcatcggcctggtgctgggaacacgccccagcccactgggcctggcgacctacttcgtgacagtgctcggcacaggagccacgttcgccggggtctcctacgcggtggcactcagaacgaagagcgaggcagcgctatccgcgatcttcaacctcatcctgctacccatcctcctgctgtcggggatcatgctgcccatgtcgttcgcaccacactggatcgccaccgctgcccacgtgaacccgttgtggtacctggtgcaaggcgcgcggaaccagttcagcgttctagggctcgtggcggcggccccatggagttgggctgtggccatcgtcatgtcagccgctgccttcggctgggcaagccacgaattcaacaagaggcgctgacacaaagaatggtgccgggaacccaggtccccggcaccaccgagtgcactcgcgacgtcaacgcaccgttgcggtcactgcgcaggtcgagcacgaggacgacgagcccgcgctgctgcaggtcgagccgccaggcgcgagcaggtcgacgttagcgtcggcgccgccgaagacggacgtgacggccggctgagaggtgcggatgcggtgctccagcgaggaggtggtggtgagtttcatgggaggtgctcctaggagtgagacgagaacaaaccctagcgataggttagcagtccgcaaccgactccgggaatagtagaagcgcgcatccgtagcggaagaccttagcctgattacagtgaccctgttcgcgtctcaacattattccacacccccgagcagcgaacgacaccgcgatgatgatccgtcgcctctccaccgaagaactccgcgcccacatcgcaccgggccgccgtcccgtgcatcagacctgccgtcaacgtcggccatgaagctgggaaggtggctctcgtctaggagcagacgcgggacgcctcctccaggttgggccggggaagtgtccggttcttgatgtaggtggcggtccctattgatgggcgttgaccgtgggaatgcggtcggcgaagggggtggcgaacccgttgagcgcaggcttccagcgcatgcatcaacgctgtctgccggccaccggcaagcctcacccgcccgtcatggccatcatcgaggtgccggtgaatcctcgacacatgatcccaactcccccggaggggcttccggggctgttcagccaccagatcagccaggcggcgagcccgactctgccacccggaccctgcagagcgtgcctgctgccgtcgtgtcgtgtcgggccagtgggccaccagatcggccacatccgtcttggcccatctccagcccgccagacccagggaggccatcacctcatcgacgccgcgccgggtggtctcatcaaccccgtcaaacagctcgggccacctcgatgatgccgtccgtgaacgatccagattcatgacatgctcctcttcacagatgccgacgacgatcaggccgtggccgtggcaacggggtgacctgccggcgcggctcacgacgttgagccggaaccacacgagacgcaccagtgtgctgcgccgtcttgagtcgggcgctgtactgggccctggcgctgtggtgaacagcccgacgaagcaccgaccgccggctgtcctcatcgccagggcgaggcatggggcgcggcatggtgcgcccggtagcagcatccatgagggtgatccggtcagccaaaatgccgagccggttttcccacttccggggccacggcaccagcaggtcacgctgacagcccacgccgtggcgtcggcagtccacaacattttctcacggccaggatgcgagtgcagcagctccaccggaacaccagcatcacgcacccgccgcatcgtgacctcatcctcacgtgccaccagcgggggagagcgactaccgctgcagccggtccaaagcgactcttcacagatgagggggtggatcggtagctgacccctaggtcctgatgtgggtcgaggtccttggaatgatggaagttcctacacacccatcgccaaagacctcaacatggacaacgctaccttcaccactccctcatccgtgaagagccagtttatgcacggtgttgaaagaggcgtcggtctacgacgaatgcgggttaatggtcttgcggtgtggggcgctgggcgatggcatcgagaacgcgtgagtgggtggcgatccattcggccgcgtcggggttgatgttgcgggcgacggtgtcgatcgctgttacgtagtgggcaagcctgcgaatctcagcttgttggtcagggtgatcgctgatgagaggctcttgatgggaggcgcggttacggacgtggcggatgagctccacgttttcctcgaagtcgcgtcggctacgccccgggtagtgaggcatacctccgttacgtaagtcagtgagagctttccatacggttgcttccaggcgcggggtgagcagaaagcgccagttgtccagtgacagactcgccacgatctgatcaggggtcgcatcgagcctcgcgcgccgcagtcgcttctcggccctggcgacgttacgcgggaaaccaccgagccgatagctcggggattcccaccaacgccgtatgccagtatcggcgctcaggcgcacgtcaatgaagtttctcaggagtacctcgacatggctgatgtcttccaagaacgctttcgagatgcgggtgttccacacgtaccacgcatcgactggttcgatccggtagcggctgagcctggcgggtgagaaccactcctgcaacgtctcacgactcaccgtgggagcgtggtaggattgatgacgataggcctcgggaaggtcaatgccgcgaaatatcggtatacccccgaggccattgtcttgcccaggcccctcctcgcatacttgcggggcgtcattggctgccgtcatctcgtctcttcccggtacgtggctgtccatgttcacgggcaggtacggcaatgaggttcccgcacacaaacctctaccaagcatacgctggcaagcccccctctcggccccaccacaacatcaattgctgactcgaacacctttgaggcagcgctttcggcttgcgcaaccccacccacgacaccgtccgcttactactcgaagctgagggattcagaccccacctacaccctcgattgtgaagagcctccaaagcccgatacaacgtctggcgagacaccgtgaacgacctcgccaccgcagcaacgcaccagcagcgcgggatggcttggtattagcccagcgcagggcccccaggcaccagccctaacgaccccgcacccgacgtggctagaggataagccgcacgggaggactccatacccgccgactcattccagcccgccaccagccgagccatatgatcaaccgcccgcggtaaataatccagccactcacgccggtcgtacaaggaaccggccccgctccaggcgtgtgcccaggatcgccacaacacgtcgagctcgaccaccacgcccggaatagattcccactccaaatccggatcagcggccgccacgtaccagatcggccacatccgtcttggcccatctccagcccgccagacccagggaggccatcacctcatcgacgccgcgccgggtggtctcatcaaccccgtcaaacagctcgggccacctcgatgatgccgtccgtgaacgatccagattcatgacatgctcctcttcacagatgccgacgacgatcaggccgtggccgtggcaacggggtgacctgccggcgcggctcacgacgttgagccggaaccacacgagacgcaccagtgtgctgcgccgtcttgagtcgggcgctgtactgggccctggcgctgtggtgaacagcccgacgaagcaccgaccgccggctgtcctcatcgccagggcgaggcatggggcgcggcatggtgcgcccggtagcagcatccatgagggtgatccggtcagccaaaatgccgagccggttttcccacttccggggccacggcaccagcaggtcacgctgacagcccacgccgtggcgtcggcagtccacaacattttctcacggccaggatgcgagtgcagcagctccaccggaacaccagcatcacgcacccgccgcatcgtgacctcatcctcacgctgccgatcaccgtcaaccagatggtcagccacgatggtgttcacaccccatgactcatgcagttgcctggccaaggcgcccaacacctgctgacgcacctgtgacttgacgtcatcatcctccagatcctgtgtaccaaccatcacggaggccaacacatcactgcgttgctgaaccagggtgttgacgacgtcgacatcgtcgatacccatgggattgttggcgcgcgcggccacggcatgaaacgtgttggactgcaaattctcgaccagaccacgccgatagtcgttgaactgggaggtgtcggcaatgacaccggtcatgatgtaggccgacccctcggacaaggccctgtaggactcgtcgacgaacgccaccaaccccggccgccgccggtaaagtcgacctgcttcctcgtcagccagcaaccatgacagtttttgccccatatgtcctccttgctgacatgacctcgaacatggtaaactttccgtaggaaaaacggggcaagtactttcgagcggctacctcggcccccggtgggctgtccagccttgtgcggaccgaagccgggggattccttatgtttgcggcaatgatgccgctgcaccccctcatgccgtggtgtggtcctttccccgtgtgcggtgtggtgcgtcgttgactggtttgtggccccgagccttactctgaccggtaggagaacggtgtggggtctacggatagcccactcggctcccggtggaatgtccaacagggtagggttgatgagttggtccatcaggaccgtcccggtggctgcgtcaatgatcgatatttcgatgatgcgcccgtccaggtcggtggtttcggtgtcgaggatgactccgactccgggttctaggagttggggatccaatgggtggtcatcgtgtggctcctacagggagtgtctgggctggacagcggtgcaatacccgcgccatagcggttttttctgcgggggtgacccacagctggtatttcgttttgacggcgatttggcgggccacgtagtcgcatctgtaggccttgttagggggtagccaggtcgctgcatccctgtctcgtttggcctcattagcgggtccgtcgacagccagcaagttcaacgggtcgttggccagggcggtgcgttgcagcggtgagagtttttgcgcgccggtaatccacgcgttcccgagggctacgacgtggtcgatttggactgttgtcgaggtgtgccggccgcgccgccaggcgagtgtggacccggtgtaggggtcgtggagtcgcccggagacgaccacgcatcgtgatccgggtttcaggtgggcctcgaccaggtcgcgggcaagggcatcgttgcgggtgtcgcatccgttgtggccccaggggcgggtcaa

SEQ ID NO: 31 - DNA, 56169 bp, Propionibacterium acnes
  source 1..56169: mol_type = genomic DNA
tgccgacgccttcggcgtcgggtgagcgcgtggataggcgccccttcggggcacctgtaagcctgtatcgctgcggtttacagccttggccacccaaaggggcagcaaggggcccggagggggcattctgcgccgctgatagcatctcacatgtgagttattctctcaactatccttcaagtcaagcgtattagattatttatctagtactcttgacagtccgtctatcgggctatatatttataagcagaacgagagatcgggaaaggaatcaacgatgaagtacaccgcacacgtcaacatggtgaccaagccctacatcggacttcccactacccgaaccccctacaccctcgtcgacgccgactgggccacaacatggatgatcgacgaaacctacgaagcccactaccacggcaccagcgtggagatcagcatctacggcgaaggccccaactgctccgtactcaccaaccgcatctacaccgaccagcccaccgatgtgaccgctgcactcgccaactacggcttcaccatcgacaccaccaacacatccaaaaccatcctcacgctcacccgcacagccaccatctcccacctactagccatcctcgatggcctaccccaagccgaggggactcactggctcaacactcaacccgacctccaccacatcaccctcgacgactccaccaccggctgggccaccaaccgcaccgacgacaccgacaccggcgtctgctacgacaccagcacccacaactggcagatctgctgacagcataacgggcctgcccttgaagggttggactctgcacccatttcagccgggtacgttgccggctgggcgaaggaagcagacggcgccgcgattgaagctgccgccgagcacgtcgcgaagacctcccacgcgattgccgaggcgttgcagctcaccgcacagtgagccccacggggcgaccggctcaccccggtcgcccctcaccccccgacaggggaaccgttcccgccgcctgaatctccatacccctgatacgtactacgcggggtcgaggagtggactcccccaccctcgtgtagtacactatactacacagtcattgaggatagaggtgacgtcatgagtttttcgatccgtttaaccgaccatgagcgccgcttagctgattcctacgcccgcctgcactcgcagtccctgagtgaggctttcaagcaagccctcttcgaccgcatcgccgacgagttcgatctgcaagtagcccgtgaggcactcaccgactacgcccgcgacaactaccagtctcgccccatcagcgagctatgggacgagtgtgacctatgagctggcagatcgaaaccacgagccggttcgataaagaattcaaaaagctagaccgctacacccaaaaactcattcacggctggatcacgaaaaacatcgacaacaccgacgatccccgccgccacggcaagcccctcaccggtgatctttccggactgtggcgctaccgcatcggcgactaccgcctcatctgcacactcaacgataaccgcctcaccatcctcgccctgtccatcggtcaccgccgcgacatctaccgataagccgttgcaagactgcggcgtcgacaccgccgggaccctggcccaggccttgggcctggaggaggacgagagcgaggagcacgccgcctgagcggtcgccggcacttcccataacagcaccggtcccggcggcccggccccgcgtctggtgctcggaccgatgccggcgcctggcctccgacgcccgccggggccagcggctgggctacctcgacgtcgacgtacaacgggccgaacgaaccgtgcgctgatttaccaccgcttccgcacagagaacatgcctctgactaggagaaatgacgttttccacagggcctctattactaatatccctattatctctatccacgcgcgcgagcctcagcgttcaagcttcaggtcttgctcgtctccctcgcgcctcgctgcgctcgttgctactgccgccccacccggcaagccgggtgggttgccatcggaataccgtggaccatcccggcgcatacacccagacggtccaagatccaatccacgctcacccgcgacgccgctaacgatcctcatacaccgtagatgccgttctgagagccttccagacccgcacgtgggtttattgcaccgagacccaaatcccctcagaagcgatcctgaaaccgtctacgccccatttccgacggacgctggacaggctgggcggcttgtctcccgccgcagacatggccctggcatatgcggttgccgactggtgggatcagggattggatcacacggcagacggctggtccaaggcgggtgtgcaggtgcggtgagcggcagacgtgaccggtggggtgcactgtcatggccgggcatctgccgagccaccatgcgggccctggaccaggaggcagcccgctgcgaggactgggggaagacggcggcacggatgggccgtcgggatgcggcggccgaattcaccgagactgcggtgcagcatcgtggacagatgcaccacctcatgtcggcacaaaaagtgtgggtgtcgaccgacatggtgtcggctacactggacgccgcaggagacgtgccgagtttcgaggccgtcgacgtccctgccgccgggctcatgggtttggccagccccctgccgccggttaccctgcagcatccgctgtatctgcgcagcgacgagggtgtgacaaccttcactgatccggttctcgtcgacgcgctgggatggtggatggattctgggcgtgtgcacgtggtgatgtgcacacgcacaccccggctgcccaacccggtttatgcggtggcctccccactgacggtggtggagaaaatcacggtgcccaccggcatcgagttcgagaccatggagtccaggatcctgacccccggcggcgtgacaggcgtctcacggcagggcacacgcatgatgatccggttggcgtcatggctgggtgccgcgtgggtgctcatggcgactccgacggtgtcggagccgcaccctatggatggccggtggggaggcccagcaacggggcagacccggccgcgtgatcgggtgaccgtggtcgacatgcggcccatgaggcaggtgcacaccaccaccgaccccaccggcaggcggttgacgacccggcatgtcgtgcgaggacactggacacaccaaccctacggcccggcccgcagtctccgacgcctgcagtgggtcgccccattcatccgcggccccgaaggggctccgttcgtcggcaccgacaccgtcaccgtatggcgccgctagatacgcgggcgcggggggttgacgaacgatgcccccctctttgtgttgtgatcagtcgtgatcggcgggttttaggtcggggtaggtgtcgagaatggccttgaggacgaggtcttggattgtggtgtcattctgggctgccttgaccttcagtccaacgccgatgtcccgggggattctggtctgcaacttgaacaggtctgcctccttggttttgaacagtttggctgcagggttggcaacgggctgttcttggcgctggcgtccaaggttgcttttctttcgggcggtcatgacatcatctccaacagttcgtcggcaacatcggcgaagaaggcgatagtttccggctcaggggtacagccgtaggcgcgcttgatgacttgacgcttggggatgacgtgatcgaccaactgcgtctgggagtcgttggctagaaggtcgcgaccttccttgaacagggaggtattcggttcagctttggaaagcagcaccacgcgcggggttcctgcggcggcgtcgtgcgtctcccaggtgcgcgccatgtcgagcccggacgtgtcggtggggatgataaccagatcggcggcgcgaatggcggcggtgatgatgtcaccgttgcccggcggggtgtcaatgatgacaacttcttcgggtccggcgacgaggtgctggagcgtcgccttgttggccggttccacggggaaccccaaggggtcggcgttactcagtgtgcactcggcccaggatgatgctgacccttgagggtcggcatctttgacgcggaccatacggcccgtctcatggagagctgcagccagcaggatcgctgccgtggtcttaccgacgccacccttggcgttgataatgctccagatcatggtgacacctttcagtgaggatgcatatcagtttacctgcaaggagtaaagacggcaagcagttatgccgtttctgcggcaagccgtcttgcatccttggatgtatagatagttgtctacttatggttgtggatcgtggtgtctcgtaccaggatttagtgtgctcgctgatatgcacgactttcgggcggcctgatctggcggtggtgccactaacccaggagtctgatccgcaaggtgtcctcgactttgaggaaggggtctctgctttcgtgttgacctaaagtcaacggccctgggcgatcactgaatcctaataactttgtatccttccctgattgcatcttagcatccttgaattcaaacagggatggagccatgctgttttgacgacatggatgcactggggtttggttgttgccgatgcggagcgtcaggcggcccgggacgccgccaccgccgacacgctgcgggagatcgtgggactgctgggccggggcggcgaggtcccgcccgccaagacggggcgtaagacgaccggcaggccggccccggcccgcaagtcgtcggccacgcagtaaaggcagggatccgtccctacgcagagagcggaggcagatcctgggggatccgactcttcggttccgtgatcttcccggagatcttcccggatcccccagggctcatcctgatacggggtccgccgacggaccccgtatcagtgggggcgctgccaccagtgatggcgggcgggtcggtcggcgtctaggccccgcccgatggtcgcctggtctacctcgcaggcccgtgctgttgccgaggccgagaacgtctgcccacttgttgccgattcagtcccctctccgtctgccatgtcgccaacctttcctatctggcgtgctcatggacatgcccgggcacgccctcgctgctcagaggcctgctcgttccacctctggccgcgaaccgtatttctgctgaccactcctcgtgcgtgaatatttgccagccttggccattcatatttggactactctgcaccagatatcggactgggaaacctcttgcacatctctaattgtcatctattcgttgggcgcgcgctgttagatcgtgatcataccaatcagaagacaaagcgacgcccttttgagcggcttttcgaacgattctagaccgcgctatatcagcatttctaccgcgcggccagagtgctacactaaattcctctctgcaatccttaagtccattctttacttcctcatccaatttctgcgacagcatttttatggaagcatcgcactctgactcatcatcaaatgcctcaattgcgtgcgttcgccattcacggcgcgtattatcgtagccgtaatgaagtattacccaccgatccacagaatcatcgttaggatctacaactgtcatgaatggcccaactctcgctctggtgtattctcaattgcagttcagtgactttacttgaccagtcccggatttagtagacgtagacggagagtaccccgccgggaacttgactgacatcactgctgtaccgtactgctttcccgggtggcaaccatcgtaagcagcatttgccgtgacgtacctagtgctctttctctgagtgccggtaatcgccttatatggtacaggtgggtgaatcgtagccgttacggctaccgatgacacgtttgcatcacatgaagctgtggcgacataattagttgtcccattgacatgatgagagtcgtggacatactgtcgaggatcgagagtgcaggttattgttgacgccgttgttctggtaccagctgctttcgagctctttgttgcagttacagtctgcggccctgaaggttttactgacgcgactgatgtgttcgcgtgttttgcggcagtgctttgatttggttgtgcttgtgtagcagttgctgatgtcgccagtgatgcccccattaccatagctgtgattatggcgtagtctttacgcttcattgcgcccccaaataagcatgttagtttgctattttgaataggaaacgagacatcgccatgacttgtcaagggcagaagtagaaagaatcggggggtatcaagaaagatgtgctttcatcaggacgaaagcggatgggtccgttcgacttggtgacgaatgatccggccttgcgtcgcggagaccaggccggcgagtttgtcgagcagggccgccgtggcctcatcgtcgggcacatcactaaagggacgaacaaccatgacggctagggccagaaacgaccggaactgaatcgcatgtggacccccatctggcaccaggcacacacctaccgaccggaaaccctgcaccctgtcgctcccagttcacctcctaatatgcgcctatagtctgtgctagtagacattattttgtgtgttgtttcccatctggcatgtctggccccggacccgccgcgacacgcggtggtggataacagaccaggacccccggaccatagagaccagggggacgagacagtcccccggtgaggatgtctcgatgtgcagatcaggaacagaatcgccgggcacgacccggcgccggtgccggtgcagtgaacccgtggcccatcgactccacgaacgaacgtctcgccttcctcaactggtgttggcggcaaggctactcagcagccatcgtggaaacgatggacgccgcgggagcctacgaccacctcgacgacgaccagaccagcaaccagcacgactaacgccgctcccagcacgggggaaggcggcgcaccaggtgcgccgccttcccccgtgctggtgtctcgtcggcttactggtgggggtcgtaggggaacccgtaggtgtgttccagggccttgcggagaaggtcgttcatagttgtgtgttcggcgacggccttcatcttcagcgccgtgtgggtggcggtgggtagcttgacgttgaacgcggtgatcggggtcttggccgactggaaggtttcagagacactggctccctggctggccgccatttggtcggcgtaacggctggctttgtcggcggcggtgggtttgcggttcttactcacttcagcatctccttgattcggtcggcaacctgggcgaactctcctagatctgttggccgggttccgatggcttgccgataggcgacccgtcgatgaacctccgcatcgagaacgtctaggccctcaacggcggcggccccctcgtgggcatcacggtattgcctggtccaatcggctttgttgaagagcagggcccggcgtgtgccgtgggccacctggtaggtcattagcgctcggtccatgtccaggtcccccgactcggtcgggatgatgaccacatcggcgatgtcgagggctgcggtgatcgtctgagagtcaccggggggagtgtcgatgatgacaaggtcggcgtcgatgtcacggcagcgcctgacgataggggcattagccgggcggacctcgaagcccagcgggtcaccagtctcgaaagcgtcggtagcccatgacgtcgccgatccttgcgggtcggcgtcaagcaagatgactcggtactgagctgctaaggccgttgccaggtagaccgccgtggtcgttttcccgaccccgcccttggtgttgacaatagaaatactacgcataaatacatcattacacatgtgcatcgatgtatctgtatatatgtgtatcggcgtgttgtgagggaaaacccgggccacatacaacgatcccccagccaccacagccgggggatctctcagtaaagccagcaactcccacagaagttgcacccccacgatacccaccacatccgtgtcaagcccccacaacacccaccagcgccctaggcttcccccatgaacattgacatggacacaccaaccgaaaccgaagccgacaccttcgatgccgtcctcgccgacattaaccacatcaaccgcctcaccgccgacgaaatcgagtgctactccatgggagcctgtctcctcctcctcaaccaccaccccttctccgaactccgccaacactgggccgacaaccccaccgacgaaaccacgtggaccctctacggggccatcatcgccgcctccaccctggacccccacctcagcatcgacgccctagcccgcctctaccagctccccctcgacctcgtgacccaagccctcaccgtctaagcgtcgatgagcgggggagaggtagcgcactatcggctaaggaaccccacaaacaccaaacccttgtcactgggaagggtttggtgttatgctggtctcacaactcaacagaggaggtgagacatgggaaatgagtaccagaagtcgctcaaagtcctgttcaagaaactggaatctgagcaaggagcccgcatcgagacccggcgcaaaggatggatgatctacccgccggatacgtcacgatcagcggtcatgatccacaagactccatcagatcgcagagcatgggccaacatgctttccgaactgagacgctcaggattcaccgtctaactcagtgaagggggctggagctccagccccctttcaaccacctcccccggacaccacacaagaaaaggagaacatgatgtggcacgttcggttgtcgcttcgcgcaatcagcgaggacatgctgttcgacgccctggacaccctcgaccccttatccccggtggccacactgggccccgatgagcacaccggatcattggcggtgttcgtcgaggctgactcactgacagacgccatcgagactgcccgcacagccatcaccaacgcatgcaacaccgccaccataaccggcgtagaagcccgccccgaagacgaatgcttcgcagacgttgaccggcccctgttcccgccagtggtcggatacaccgaaatcgctgaaaccgcaggactctcacgtcagcgcatccgccagctcgcaggcaccgccgggttccccgcacctgtcatcaagaccgcggccggcccgctgtttcccaaagccgccgccgagcagtgggcgcggacacgccagcctaaggcaggccgcccaaaactccagaccaccacctcataacacatcccgtgtgctgaacctgttggccggcccagcacacacccccaggggccgggcccagcccggccccgccccacacccaaccgccccctgttgccgccgtggcgaaacgatcaggcgagccacgaccatcgccaagctgaatggagagcgagcatgagcaccacccctgccgggttcgacttcgacgctctggccgagtgggccgagagcgatgaggcgacccacaccccgcaaaccagccccgtgttccggggcaaggacgccgcgcgcgccagccgcgcattcctcggccgaggacggcccaccctcggctcagaccacgccaccggcgagggccggtcgccccgccgtcaggtacggctcgacgcacgcaccaacgcgcgactcgacgcctacgcagccgcaaccggcaccagcgcctcccagatcatccgcgacgccctcgctgactacctgcccgcctgatcccaccccaatccactcgggcgcctgtcagtgccccctcttctgggtggtggtccggggcgtcaccgccccggaccagttgggtagtcatctcagttgaaataagcgattagtgatacgcccctcatgctttccggtgctgtcatgagcgtctgacaacagcgacacctcggggcagccgacggacagtcctctggctgccgctctgatcccatgcccacggcacgaaggtgtcggacagctcggtctcgtcatgtgcccaaatagcgtcgtgggcctgtcgccaagcttctcgggagccccacacgggcacgaccgggccacaccggtgtcctggtctccagtgtcgcgacactgtcgatttcggtacgtgcaatgcggcggcggtttgacggatcgacatcccagactcccgcgcgtcccagatcgccatgtggagagtatttgcctccagtgcggccgccacacttgcacgctctcgcgcacgctcgaatgcccgcctagtgctctcaaatgtcgtcacgacgcctccccctgaaaatactcagggtgtcccacggtgggacaccctgagtatttcataccccaactcgcctcaccacacgtcgacctcgacaccgatcaagcgacccgtatcagcgacattgccgtaccgctgccccgcctggtcctccagccacgacaacgcatcccgaaacagcccgacgtcttccaaagctaaaccacagtcgtagccgcccttgtcccccaaccgcacaatctggcgctcccggtggcctccctcgtcgacctcgatccacagtttcgcgtgcatccgctggcctcggccctctgacaggatctcggtgagcaggtcggacgcctgccctcgcgcatcctcgttactgcgggggaattggagtatgtgggaggaacggtggtggggcaggtttgtgacctcgtgacgcagcaggttgcgcttgtgcatctgccgttcgagacgctcgggctgacctgttgacggggttgagccgtggcgccgcttcctcggcggggtctcgatccgttgctcttccggcggttcggcgtcaggttgtggtgcgcgatctcccctaggacgggggggctcgccacctatatccgagggacgatgagacggccttccacgcttgctgcgcactttcgcagcccgccccttgcggtcacatcgacgcggcggcggagtgacgtcctcaccgcgcgctaactgcgtcaacgccgccaccaggttggtgcccggtttcagccctttcagcacgaaccgcaccaggcgggggtctcggccgattcgtcgggcaatctcggcttggctccacccttcggctaacagggtgcgcaacaagtcttgggcccggttatcacgctcagtcactggtcgcctcctcggggagtcctgcctgctcggcctgctctgatagagcagcccgttccgatccggtctggggcgctttcaggggaccgggtaggacacctttgacacgcagtcgcccgtccttgccgtcgtcgccgcccccctgggccacagggagcgcccaggggggcacgttgctggtgtagatggcgtcgccgtggatagccagcagggtgcgggagttcatgcgtagtgctcctcccttggttgtggcgttttttccggtggtggggtcggcgatgggtgtgttgagggtgcgtacgcgggacagggcccagatacgggcggcgatttcggggtgccaggtgtcggggtcggggcggcggcgggcggtttggtattggtaggcgatggtgtcaccggttttgttgcggatgacgtcgaagccttcgatgtcggaggggatgtcgtcggcgtcgtagacgacggtggtggtgacggggttggaggccgacatttggccgatggtcacgcgcagcatgtttttcaacgcggaggtgaggattgtcgtggcggtggggttcttgtctgcccagcgtttctcggcgatgtcgatcatgtcttggatggttttgacccatcctcggatgggatcgactttggtcagtttgatccctccaaggaactcgatgggcttagtaacgggcccgtcaggaccgaattcggtgtcccagccttcgtcgatggctagtttcagttcggcggcgtcaacccatgtttcgtgggtggtgccgggcacgttgggccaaaaccatcctgctcgtcctttggtgcgtttgaccggtagtaggccgatgtcgtcccaccaggatggcacggtgaagcggatgtggtagcgggccgggtgccaggggttgttggtgaacaggtcgtgagcttcggtggcgctgagcagagtggcgggtgcggcaccgatctctccggtcactgatccggcatacatgaatcggccgtcgatgtacacgaagttagggatagggccggcaggcacggtggggcgccaaccttgttcgcggtcctcggggttgccgtcgtcgacgcatagttcgtagcggtgctgaggggaggtgtgttggatgagtgcgcccagttcggggtccatcggctccatgcgataggactcgggggtccgtagcttccagaggttgattccttctgctccggggcggtccatgagggcccagtcgcggtcgattctggtggcgatgatgtgggttaattcgcgccatgcccagcgggcctggattggggtgagggtctggccagggaaccattcatcagcgaccagaatgtcgaggttgcggtcggtttctttgtgggtgaaccggcctcgggcgggccgcccggacagcatgaacaggccccgcacgtgccagtcctggttgaactcgcgggtgtgagcgggggtgtcaggcagcagccaggattgaggctggtcggggatgttaccgcagacgatcaggcgtcgggcgttgtggtgtagcgcggttgttagcaggtctgacagggtcgcgtgcttggtgcgccgcccccctagcactggcaggatctcgtttccggccgcgtcgactccccgggcggtgtcgatgtctagccacactgtttcggggtcggggggccgatgtggggcgggacggcgctgctcctggtcgtctctcatggtttcctcctttgggccagggagcggccggcgtcgagggcgttcatgcgctcgcgttgttcttcgcgtagttggtagacccggcctcgtgacactcctgctgcctcggcgatggtggtggccggcaggtggccgatggcggcagcgtcggcaaggacgtcacgccaggccaggtcaatggttcccagctgggctagagcttcgtcgcggcggcgggtggcatcagccactacggaggcccaccctgtggggtggatggtcttgacgacgattcggttgtggcggatggggccccatgcatcagcggggacttgccagccgtgattggcggcggactcggtgatcttgaggcgtcgctcaggtgcgcgggtgcgggcagtgacgtcggtgttccaggtctggactggtacccacgtcccctctcggatgcgttcgatgacgcacgtggtgacctcgtcggtgactgtgatgaccagacgataatctttcccgtctggggtggttcggtagctgggcatgtcaccctcccctatctgtcaaatgagctagacacagtgtctatttaatttgacgcaaagtcaagtgcattagacgcctttgtgtggatccgccccaccagacaaacactcgcgcctcatgacccgccgcgaagccttaacgaaaccaaaccgcttatagaaccgctccgcagcgctccccgagggctttagctccaaggtaagaccttgctcgtcggcccattggcagacttgtgtgaggatctgtgagccgtagccctgatttcggggggcggcatgcacgcacatcagcatgtgaccatgacggcgggtcggcgggctgacataagccccaccacgccagtccggtgtgatctgccaacttcgccatgccgcagcgcgccagcggcgggcctcggtagccaccatgatcaccatgatgatggacagggttacgacgccgactatggtcagctcactccagccaggccagttcccggagatgatccagcctcccagcgcccagatgatcatggcttccacgcccgccgcaatcgggacgagtggggcagtacggatgcggcctgccatgatctcggtgatctcgctgcgatgccatgacaaggagaattcccacgactcttgaatcatgctgatgtgtgaacggcttcctcggcttcgccctgccatagcttctctagacggcgctcggctagctcgtcggggcacggcgacagcctgccgcactcggagcagaccccgaagtggcgcgagagagtgatgaccggctcatcgggagcatgaaccgattcaacgaccgggtgctgctcatcggtgagtcctgaggcgtgaccaatctcggctagacggaggtgaaccataccgtcgtagtagtcgaggccttcaacgtggaacgggtaggagccgtccgcggtgtggcctgcaaccaggtccccgacttccagctgactggcggtcatggttcgcaccggcggcagcggggtccgggtcgcgttgatcctcatggtctctccttgcttctgcgccttcatagatgaaggtgccacagccggggttgatgtgcggaaccacagccactttttcaataaatccatcaccacggtctcaccccttcccaaatgtgtaaaccgtggtttacgctttaaggcatgatcgaacacacaccgacacccgccgcgcctcgcgtggccatcatttcccctagcgggccaccacggttcttggccgagcctcccagcgccgcgctgcgacgccatggtcggacccgcatgaggtcccttcccctatcccctcacattcgcgcctgggtctccaccagcggccgtaaacccaatcccatagccaccgccctgatctggatgcataccggagccctgctgccggtgtgggacaccgccgttttgactgggcctgccctcggcagacgtgtgcgccctctcagcagtgacgccgaactgacctctcggcggtggctcgaccaggttgccgaccatcccggctttctcgacacccttatcgaggccgcccgcatcaccgatggatggcatcacgcgacgcctccgcacattcaggccccttaccggacccttcatcagtgaacggaggtacaacgacatgaccagcgacattgacattgaccggacccacaaacccgacgaccgcgccgaggctcctctttaccggtcctgggccaggagactcgtgcacgtctccgggatgccctggcgtatcgtcgccgccttggccggggtctcccccacctccatgcaccggcttctattcggccgcaacggtcgacccgtggaatggatcggcatcaatgatgctcgcgccctgatggatatcggcatcgatgatctcgcctcagcgtccaccgaccgtatcccggcccgcgaatcccgcgagctgttggtagccctgcacaccctcggctggaccgatgagcatctaagccgctggctgaccagttccgacctcgacctgaccaccgcccccaaagccctctacgtcactcgactatccgccgcccgcatccaggccacctacgacatgctcatcagccagcccgtccgccgctgcggccacccccgcaccccgcccgtctcgtccccgacccctgctgtcctaccccagcccagacccaacaacaccgaaccgttccaacccgccctgttcgagctggccgactgcgcatgaggaccctgcacagacgtgattaaatcgaagggctcaaccagtcatcaggagtcccccgtgcgtttgtaccgcgctgttctcgccgacaccgacatccatatcaccatccgtatctggaacactaccgatcgtgactggacctgggccccccttgacacttgggcccccgacccggccccgaccacaccagcccagttagccgatgaacttcaccgtcacggatggatcacccctgaggtccctactaccctcaccgaggtggctgtcatccccgagaactggcaagctttcgtcgagcatgccctcgctgtccggaaccagcaggctgaccaattgcgcgtcgccgagaacatcctcaccgacatcctcggcgacgccgccgacgccggcctgtctgtcaccgctctcgcccgcacgaccggactatcccgagtcgccgtctacaaacgcagcgccaaaaccatcgactccatgagacacgccacccaggccggcggaatcctcaccccctcctgtctcacccacgctgagagaacagcgctcggcctgcccgacgagtaacccatcgtttacatcctcgactggtccctgcgaccagtgaaccgtgcccccactgcgcccacaatgatcagcacacccacggcgatcatcaggtgggcagcactaactgatcccaacgaaccaagatcaaacaagccctgcccgggagcgtcgagcagtccgtgggcgcgaagccatgctccgagattgccaatgatcttggggatcatcttgttcagtagggctatccctccgatgccgacaacgaggaagacgaggatttcttcgcctgcgttgtttcttcctgtgtttgcggtcatgctgccttctcggggtggatggccagccagctgatgaggttgtcggtgatctgccctgagatttggatcagttcgacttgcccggcctgccatgcccgcgatgtgccggccagcaatgatgctgggacccctactgcgcggccacgggatgcaacctcagccaaggcggcgcgtaactcctcgacggtgctttcgatgtaccaactgccgtcagtactagtctcagcggcatcggtggtagcgataagagcatcggtgaggtcgtcgacggcgcggtccagatcagcgatgtccggtagggctacaggagtcatggtgtgtcttccttctagggtgccttcactggtgaagggtccctagccccggccgatgtgcggtgctgtgggaaaaatgcttcccattggtccgtcttagttaggaaacttggcctaagtgctgtcgagggtcgcgtgttcgtgaccggttcgaagacactgccgccttgtcttcttgcccgtggcgcttccgagatggtcagtgggcgatggctaggccgatgagggcgccgctgcacaggctgggcgcccagggaaggaatcgggtggtgtggtgtcggaaccggtcgattagggcatatagggcgatcagggtgaggccggctatgacagtgacctggatcgtgtcgatgccggttgctgcggccggggctgcccacagtggtgtgatgcgcacatcagagaaaccgaatccgcctcgggagatgagccaggcgatcatccacgctgcgaagatgatggcggtagcgatgacagcacgtatcgccgcagtatggtccgagagggcggtaacgactacagccccgatccatccggcccatccggtccacgctaggactgccggtatccatgtggtgatggcgtcaatgacggcaacccatgccccgatggtggctagcagagcccaggccggccaggtgggtgctggggcccacgctacggcggcgatcatggttgtcgcagatgcagcacagacagcgatcaagcttcggaggctgtaggtgtcgcggtagacgatcttgtcgggattggcggtagctggttctggcaggacgcgggtgagggcaggccatcctgcgaccgcaatagccgcgacggcgaccacccacacaatctgttgcatgggtctcatcatggcccatcatcgatgagtatgggtggccgacatggggtcactcgtagaggggatcgaggggtgtgcgggcgagcatggcttcctgtgtgccgagcatgagggtgccagaatcctcgccagccgattcccagtcgacgatgacctggtcgccgtcaacgctggattcggcgatggtcacccattctccgtcgatattgatgagcaccccagcggccagctccgtggcagcaaccgggtgaggtgggttgtagaagcggtcgatgtcgcaggcagggtcgtcgggttcctcgactaccggaggtggggtcgatctggctgtctcggtgtcgtcggccaggtcggctcccaggatgcgctcccattcggggctggttttcttgcccgctgaggccatcgtctcgtcgatctgttcgtcagtgggccacacaaatttctttttggtccaggtcgtggtgtcgggtcgcagctgatccagcagttccaggtcttgcggggagtgggccttgcgggggtcgggggtgtagaagaattggacttccttgggggctgattcgccggataggtaggtgccgcggccgcgtttgccgaacgggatgcccacgccgacgtgttcggagccgaacatcatgcgggctccgtcagcggacaggggtccggtggcggcacgcccggagaagttgtctcggatttcgccgcccaggaactcggcgtcggggcgttgggtccccagatcgacgtggatacggcaggcggctgccatgcgcagcagggagccgatccagccgaaaacggggcattctccgggcatcccagagaccttgatcgttgaccaccagtttttcgcgttgccgtagaactggcggtactcgtcgatgaggaccagcacgcgggtgaagtcggtctcgcgggccccttcttcttcgatgcggcggtagcggtcctccatgagagaccacagccagtggatgagggcgacctggtcggggacggtagtggcgaccatctcgatgttgggccactcccgcaggcccaggtactcgatgcgtttagggtcgatgacgaagacgcgccagttgcggcgggcaccctcgacggcgtcgccgatcatggacaccgtttttccggtacgggtgcggccggccttgagctggtgggccatgacaccggagatgtcccagaaacaggtgttgccgtcctcgtcgacggcctgggggattttctcccagtctggggagtctgggcccggaagggccacgggtcggggcaccatcgagggcagggggtggcggcgggtgacggtgatggtgtcgtgttccaggtcgaagtcgctgcgccactggccgagcatcatcgccgaggtcaccgcggccaggcgcaattggatgttcgggctggacaaatgggcgccacgttggtggtgaatggtgaagccgtccaggttcccccgatcggttttccaggaatcgacggtgaccgccgacccatagatctgagtggctacttctttagcccgttccttgtctcggtccagatcggttttgtcagggtcaggggtcggggcgcggtattgcaggacgaaccggccggccgggatcgttgcggatgtcaccgtgaactctgccggcgaccaggcagccgcggccgcctgggtgagggccattggcatggtctcgacggcagcctcctcgggggggatggtgagggtcaggcgtcgcggatgcgtcttcttgcgattccatgtgactttctgcctcaccggcaccttcgccgccgactgaatggctaggcgagctgattcggcagtttcggtacgccggccagcgcgtagcgcccgtcgtgcgtgaaggctgcccaccacagcacagcccatacacggcagccacgagcgcggatcagcggctgctgcatagcccccggtagctagtaccgcacctgaccagccggccgcgatacttttccacgccggtttcgcgccaccaggaccagcgttatggacggtctgcttcgaggctgcggagggacgagacagcggagtgctggtcatgccgcggcctccttgtggcaggtcatttcacaggcatgccggccagcgatgatgccgtggcgcaccgccccggtagccgcatagaccgcgcacaactcaaacacggggcacccatcgcaggccgccgggttcatgctttctttgtcccacgatggtgggtcatcggtgcacggcacggccaggccatcctgttgagcggcgctgatagcggtgaataggcgcagctgggcgcgaacttggtctggggtcaggttgacggtgcgggctacacgcatggggttccttcctcttcaccagtgaaggttccctagacccggccgatgtgcggagggatttcagtgttttatcgaggtgaccagccagccggtctgcgctgcgggttcaggtaccagggtcagatgcagcatggtgtggtcggctaggggcacggcgaccaggggcccgtcggcgctcgccccggtgagggtgggagttccggccacggtggtggcgggaatctggttgggtttcgcggccatcagggagcccatgagggtcggggcggcgatctggacgagggcgactttgcgggcggcgggatcgcgggtcaaccagccgcgggtgaaggtgagcgcagccgacgtgatatcggggctcagcggggctggtgtggcggcggggtgggccgttgaggagggccatacgcgcggtagcgctggcgacatcgagcgggtcggagtggggtcaggtgtggggcttagggtccgatgtggcgatggggctaccgccccggtggtgggagacgagactggttgggggtggtgttgagggcgtgggatcagggtgaaggcagccaaactggccgggatgaggatgacggccgcgccgacacttcggagcgaggtcatgtgacgatccttcggtagctcgacgggttgccgtagatcttttccacgttgatgccactatgtgggttgtcggcgctaaccatttggcctccaccgatgtagacggccacgtggtgggcagggcttccccagaggatgaggtcgccgactttgagctggtcacgggccaccgcggtgccgactttctgctggtcggcggcggtgcggggaaggctaatgccgatacgccggtacagcgccgaggtcaggcctgagcagtcgtagccgccatcggctttgccgttgccaccccacacgtaggcgtaggagttgttgtcggcgatcgatttggcccatgccacggcttcggccaggttcttcgacacaccggtctcgttagcggccccggtggcacagttgtttgacaggtgccctgtagtagtggatcccactatttgtttggccatggtttcccatttggcgtaggcatcgggcagggctgagccttgcactgcctgagctgcctgcgtcagcggcatcttctgccagtcagcgatgtcgactaaaccgggaatgtggaatccagggccgccggccgatccggggccagcgtaggtgatggtgtggcctttcaagaacgcctcggtggcgtaggcatcattgttgacctgatccagagtcccgtaccagcccggcaggatgcgctgctgaaaggggccggcgtcaccgtcaccgttagccttcgctgaggtagggtcggccccaagatctgattcttgtttggcggtcataatagcgatgaccgctgcctgggtaggcagtttgtcacgctggaccacagtgacgatggtggtcacgagctgcttctgcctggccgtgaggcctccggcacccacagtgcctccggtgacggtacccacgcaagcatccccgccgacactgccaccgccgacgccagagttgtcgtcgagggccccagagcctactgacagcagcggcacaatgatcacggtcgcgggcaagaccgccaggcccgccagcatcagcactgctgcactcaccacggcgatcacgtgagatgctttcaacgctgcccacctttcgctggtttgagggggcgacgcctgctggtacgcacaggcttggttggtccagtccgccgttggttggcaggcctgggtttgatcggcttgctgggacccggtttgggctccggagtcttaggctccggcttcacatgcctaggcacttcggctgcggtgggaggagtcagcacgtggcgtaccggcttggtgaccttctgggcacccgaaacaaccggcttagacaccaccttggcacctttgaccaccggtgcggctgccttcgcgccggccttcttgactgcacgatgcgctttgatagccccggcctcggcccggccaaccctgctagcagtagcatcgagggctctgtggcccgtcgttgccctcaccggtgcatccttgccctggcgggtctgcttagcgatcgccgacatgccgcctcgcaatgccgaaacatgattgtgggcgtgggcgatcgccgacatgccggccgtcgcgatttttgactggccctgcggggcccctgccccagcacgaatctgctggtaagccgccgacgtgccacgagcacccgccgccattcgcgccaccttcgcagccctagtcactcccgtcgacacgccacccgtggctaccgcagcagcacccgagaccacagtcgaggccatccgccttcgacccaatccggtgagcttgcgaccaccgctgcgcaccatccggcgagcaccccgcccagcccactggccgatcaccgagcccctttcggaacgcttgctgcgcatccaatcgttgatcttgtccctcagccccttctcgcccttgtgacgacgccacatggacatcaagaacccgataatccccacgagctcgagcatgttgacaaccatgaccttgatggcgacatcaccgtcagaggcgaaaaccgacttgatgatgagcatgaccacacccaacatcaccatcgacccgacaatgccgatcatcgagtacaagatcgaacacagatcccggatgagcggatctgtgcggccagggatagcccgcaacacgttgagcatcgacatgaacgccgaccacaccaacttgcacacgtagaaccagcacatgcccgcgaacaccagcaggaccacagccaaacccgccaccgtcgacgagtaaaagaagaaccccaccaaccacgaaccatccgcaatatcgccggcgtaatccgacaacccctcatcacagtcaccaaggtcgtcgcgagcatccgagacgtcatcgtaagggccacccttgagcacctcgatgtacttgtcgtggcacttcgcatcaataatgcggccatagttgagctgctgatgaaccggcgccacgaacgagtccacaatgatcgccgacagcttcggatccttcgagtctcccgtcgaggtcatgtcatcaggaatctcgacctcaccagcggtcgccgtcgcaggatcaaccgaactggtaatcatatgagacagcgccacaccgaactgctgggtgcgagccagcggagtagccaacgtcgtcgtatcgcctgcgaacttcgccaccggggccgccaagaaacccaacgccagcgccgcagcaatcgccgcacgcgcacccgtagcccacgcccctgccgtacgtcccctcatcatcttgacgaccacgcccacaccggcgcacgtcgtcagcaacgtcaacaccgttccaccccagctgtccgctcccagcggggccaaaaccttgtcgtggatgtcgttctgtaaccccaccagcggtccggtaatccacccgacccagctcatcgccacggtccagtccaacaaccggcacaacagggcaatgaccatcaggtacgtgttccaacacatgccaataatggaggcccacatagccttcagcggggccgtaacgccaccatcgtccatcgacatctggtactgaaacaagtgaataccgttggagtcagtcacattgaaaccgtcacccatccagcccagccccgggcccgatgccatggcaggcacactgctcagcgccaccaccagaaccagcgtggtgacgatgatacggaaccgccgctccccggccccggggcggcgtggatgacggctcacgctgtctcctggtcgtgctcgggcgggttggagctggcggcttcgcggtggggagcgtaggcaggtctcagtagtcgaatttcaccgacgttgccgtgttggtcggcgtacaggccacaaccggggcctccggggttgagggcaatcttgaccaggtcagcgaactcttcaggggacgttttagggtccacgcccaggaactcgacacctttctgggcgaggttgatgttgtcgcacagcaacacgatgcgatgctgaatgaggttgcggacggtctcgttggggtaatcggcctcggggtcgtgggagccggtgataagccaggcattggctcggcgggattcgcgcacgtactcgtcaatggcgtgggaggcttccggcgaggacgacatgtgatgaaactcgtcaacaatgaaagcggcgtcgcgggcccggtcgctgaagcacaccaggcgagccagacgggcaatgagcgcgtagagggctcggccaaacaccttgtgcgggggcagctgccgaaacagatgttctgacagcatctcctcggcgttaggaagagcgatgccacaagtgccaatgatgaggatgtcggcactcaggtcggcgggaggaaggtccgggtcaaagatggccgaagctagggaggccgagttctcgatgtcagcgaacacggcaatcctgtcagcgatcgcggtggcctcgggaaggtcgcactcctcggccaggtggcgggccaaacgcccacacgaggtgatctggtggtcacgcatgtaggccggtttgaggaccttggccagcgtggtcccggccacaccgatggtctccaagttaagcaaggtcagcaagaacgactgggcgacctgcccggccatctccgggggaaggatgcgcagcgggtccagcgacagcttggggtgggccgtgtcgacgatctggcgtctaaccccgtcgatagagttgacaaaggttacccactcccgctcatcggagttgtcggtggcaataatgcgcccgccccgggccgcgatggctgcgcacagccgcttctcggccatcgtcttgcccgcgcccatcttgccgatgaacgccaccgtgttgcctttctgatcctgagtgtcggcatgcaaatcgaggtaggccagcgactgcaacggggagcctgtgaccacagccaacgggatgccggtggtacggcccaaccggtactcaaccaccgggatagatgcggcgaacgcggaggcgtgagtcagctgacggtaggcgttaagcgaggaggagaaccggccaccgggccgggcagcccacagcaagtcctcctgacggcccacgggacgcacccacgtgaagtcaccgaacaccggatcattgacgaacgctcctgccagctcctcggtggtctcaaagtcaggagacgagacagtgacggtgataagagcctggatctcgacctcacgctcatcggcggccagctcggcgttgtagtcgacgagcacctgagcggaatgctcgatagacatgagggtcgaagcctgggtcatctcaccgccctcgacgttgtcgagctgatcgaccgtttgacggatagcccgctgatttttctgcatcgcagcgtgacgggtccgggccactccccggatcgccacgtcgaccggcacgccagtgtcgtcgatacggcccaaaaactcgtaggcaggccacgtcatcgtgcggggcaccttacccagcacgatatgggactggtagacggtctcgccggtgtcggcaccgattttgaggacgcgacgattccacgcctgagccgtccgggacatgtgggagactcgcttgtcatcctcgctggccagcaggtcggaggtcgcggcctcatcgatgaccaactcccccagcgcggcacgtccaacctcatccatgagggcgattccctcgccaggggcatcatcacgcaaccgggtcgggtggcctgacaggtgctgccgaagccagatctgttcatcaacggtgaccgggcggggttggaacgctgccggcagtttcgcaccgaattccttagcctgacggagggcccactcccgtgcgacacggccaggagcggtggtcatgagtccggcggcttcggtgattttgttgagggcggcggtccaggcggtgtgggtgcgtattttctggtcttggttgagtttgatcgataggaaccacacgcgccggcctagggattcggtttcaggctggtcgagggtggcgtcgatttcgtcggcccacacggggtgttcgctcaggtcaaggccggcggccatggcgtcgacgatttctgtggggtcggtccaggtgagggctccgttgaggcagaactcgtggcgggcgaggtggcggaataggtcgcggtgagctgcggcgacggtgagggaggcgttctcggtgacgggtcgctggaggggagtgagtcgccaggtggcccagatgtcgccggtggaggtccagacgaggttgtcgaagaggaaccgttcggggatggacatcatgactccttttcggcggcggcgaggaaggcttccaggccgctgcggcgtacagcgttcccggtagggtgcaggggttttctgggggtgggttcagatttcgaatgtgggaggggtttgtggatggtatcggtgtcctcggcgagggcttggtcgagcaggcaggtggccggggtgtcggtagtctcgtccagctcgtcgatcatctcgtcgaggaggttgggggtggtggatgcggcccacacaggtgggatagccggtgcgggtcgaggcggtgtggggaggcggagtttggtttggccccagaggggtgtgtgggtcatgccggcgggagtggtggcggcgtgagtggtcacacgccaccagcccgccagccatgccagaggtgaccaggtccagtcgatgcgaccaacaacgaactgggcgagccatccggcagccagcgcgaaaatgaaaccgcggatggtcatgcccccgtcgataattttgaagcccatcatcgcggcaggaactacgccgccgacagcgagcacctgatagatcgtgtagggcccgccaggaatccttcgacctgaggaatccttaccgataatgcggggctgctggcgggcctcggtgtgccactgaatatccacgatcagctcttgcccaatccttgcatcatctgtccgaagaattggatcgcgttaccttcgataagccagtgcgccataccacacacaaacagcatggagacgatcttggccaggctcataccgtgtttgaagatgttgaacgcggcaatgcccacgactacgaccatggcgacggctcgcaccgcggactgaccttcacctgccttgatcgtcgtccattcgaagaggttctgcgattccagtggcagcaggaggaattgatcgagcatgagaggttttcctttcaggaagccgaccgggatggtcccggtactgacgggctggacggcacgggtgtgccggccaggggcagaaggcgtgacggctggtcgagggaggcaacctcccagcggcctgcacggctgacaagagtcaggccgtactggctggtccgggtagtggattcgtcgccggtgggctggcatgtcacggtcaccgtgacggtaatcttctgccggtctgagggggtggggacctcgtcaggtcccaccacatgagtggttttcactgatacgcatggggctgggtcaaccgcggtgaaagcggtccctgggctgctccatctcgacaggtcggtattcccggtcagcatggcggttaggaagcctgaagaggcttgggcggccgggtcggcggtgcgaagctccgaggtgtctagggtgggggctgaggccggtgcaggcatggggatctgtccaggtagacgcaaggcgatggccttgccgttggaatcgacgtggaccgggactgaccaggcctgtccgctcccggattggccgcccatggtgaccacggtgacctgccacaggctcggatcagacggggagacggtagcgtcataggcggtgacggtggtgggcgctggaccaggtttgcggggcatgcgcgcatcggtgatcttggccgccaccaggtgttccagattgtccaagtgcccggagtcagaggtcagcagaagagtagtcacctcgaccgcggtggctgaggcgatctgagctgtgcggcggtcgtgatgggtggtgtcagtgctgacagctgtggtgggagcggatgccggggccgccgaacggaccagggcaacggggccgcatgcgactccgcacagcacgagggcaaggaagcctttggtggccatcgatccggtgtggggccagggacccacgttttcctgtgcctgttttttcttggccgaccaacggcgggacttagggttagcggatgcaccttctggggtgcatgctcgtctcaatcgcatcggtcacctccttcactggatgaagggaccaaggaggtgaccgatgtgcggtcgaacccgaaaaagttcaaacttttttctgggtctgcctcaagtacgacagaaggcctgcatcatcacggcgttgtggtagcagatcttgcgtcagcgcaaatgtatgggcctcgtaggagtagctcttaggtgggtcccggtggttgcggccagggcgagggtgtcgggtatgtgtagcgctagtcccgggttcgtggtgtgagggcttttgggtgctgacatgcactacccattgctagacgctgtgctgtggcatggctggacgtctagcagacgggttgacatcacctttaggctggcagcgcccgaggccgcaggccagaggaagcggacagcctaacgattgacgtccccctctcctttccccaacctcctggagtcgatgacccggagatagatcgatgtctatgcatctgtgcatcgatatacctatgtatctgtctgtggtttttagaggccactcccgtcgccccgggccgctcagcgataccgcaaggctgtgtgggatcagctgtgccgctctcccgacatggcagacagcaccctgcggactgactgacactgtggcgccgcggaggtctcccgcggcgtccgctggggcgagtgcatgcctgtcagctcatcttttatcgtcatgtttccccttgtcagagcggtctttgcaaagtgacaacgtcaggggtcttgacgacaacatcctcgacaacatcgtggcggtggtctgtgtctcgtcagttcaacgcaccggggaaagaggcaccgctgatgttcaccaccacaaacaccctcaacgatgagtgggaccagattcgcgccactgagatcgattggcatgactgccctgaactgatgcactgcatcgacgttgatgatgtgttggccgtcattcctgccgcccccgacgccatcttgggctacctcattgcccgggctcagggcggtgacgagttggccacccgcactatcatccaagcgttcacaggcaagcttatcttgatggccacggccaccaaggtgcgccgtactaatgacggcttcaatgatctgttggcgggtctgtgggagacgatcatcacgtacccgttggatcgtcgccctgacaagatcgctgcgaacctcatcctcgacacgttgcaccgggttacccggttctggcgtgctgattcccccgatgaggaagaggctcacggtctggtgcccttccctgacactctcatcgccccagagcccgatgaggacgtcacagctagccaggccatcgccttggcggtggaccgcaactggattaccgaggacctagcccgcctcatgagccatatttactgtgacggtatgactggagctgatgcgggtcgtctgcatggctgcgctccagctacggtgcgatctcgatgccgtgatggtcgggccgtgttgcagcgcaacgccgagacgatcctggccgtctgctgatccctctcttgctcatgcctgccgccaccctacccctacctgctagaaacatagccatgtctccagcaacgcatctagcgtatcttctagcaattgatctagctatgtatatagctgatgatctagctaccatatagctgtgtctccagcccaaaggacagcccaatggcatgcttgccacaggaaggtgcgtcagcctcccgaaatactggaaggagctttaccgtgcaggacatgacctcgaccagaccgattgaccgatccccgttcgaccgcactattgcggtgtggaaccacaaaggcggcacgttcaagacgtccgtcgtggcgaacctgggatacctgttcgccgccggtggcaacaaggtgctgctggtcgacatggacccccaggccaatctcgacattgacttcggtatacccgcgggagaacgtgaacggggcatgggattagccgaggcgctacgtgaggggacggcccttcccccaccgcagcatctcagcgaaaaccttcacctggtcagtggcggcgctgctctcaacgagttcaccgaccccgcatccttagcggccatcctcgaccgagtcaccaccgcacgctacgacctgctagctcaggcccttgccccgctggcctgggactatgacctcatcttcatcgactccgggccggcacaaactctgctgtcccagaccatccttggagtagcccgctggctggtagtgcccacccgcaccgataacgcctcaatcactggcctcgtcgacgttcaagacgccatcgacggggttgcctcctgcaaccctgaccttcaactactcggcgttgtcctagccggcgtgggggcccgggccacccggatcgccgcagataaacgccacgccatcgacacagtgctgggggcaggaaccgttttcgatgcggtcatccactactccgagaaggtgtccgtgctcgcacgccagcagggcaagaccgtcgccgagctagccaacgagtaccacaacacccagcccgcctacacctacctagctaaaggccagaacatccccaacgtcgccaaggcagccgtcagcatcgaaactgattatctgaggctggccaccgagatcagcgaccgcatgttcaccagcgacgagcaggagcctgatcatgactgacgatccgactccatccgagcagaacaaccccaccagcgacgacatgcgcttggccgaagaatgggccaacagcggccgcacagtgggagccctgccgcgccgtcaacggcctcagcgacccacaccccgcaccaccagccaaccccctgtctcgtcccctgacacaccggctccgaaaaaaccccagaagacccccaccagccagcctggccgtcaacggatcaacgtcaccgtctacgttgtgcccgaactccatgagcggctgcgctcccgatcggcggcgacgggggtgacggtctcggatctggtggtgcatgcgttagcgttcgtcgccgatcatgcgggggaggcgatcgccgatgatctgcgcgtcgagacgggccccggcatgggggccggactgttcgatgtgaccccatcgcggccagtaggggtcgccaaaacccagctgggggtgcgaatgacccgccacaacaaggatggtttggaccagctgacccggacgagtggagcccgtgaccgcagccatcttgtgtctgtcgccgtgcgcgactatctcgactccaaccctgtaaagaaaggccgacatgtccgctgatgaaactcctgccgcccggggtgggcgacgctttgatacgaccgtcaagcccaggcgccgtcccatgcttatcgccgccggtatcgccatcgtgatagtcggcgcgctcctcatcactcagttgattcgctccgcccaaaccgagcatcgcgtgctggaagtccacgccgatgtggctcgcggcgaggtcatccgtgacaccgatctggtatcggtgactgtcggccaggtcgacaacgtatcaacggttcccgcagaccagctcgactcactggtcggcaaacgcgccacggcagatcttcgagccggatcactcttgcctgctggggctatcggcccggccgatgtcgttccagctccgggcaagtcgctggtcgggctgaagctagccgccggacagatccctatcggagaccttgctgtcgggacgaagctgcgcctgatccagacgtcggcacccagcggctcatccaccaccactgatagcagcaccaataccgatggccagtcgtgggaggcaacaatggcgaccggcaccaaaaagaccgagcaggtcaccttgatcaacgccgaagtgaactcgcgtgatgccgcccggatcgcccaactgacgtcacagggccgtatcgccgtagtgaaggatccgatccgatgagcaccattgttttgaccagcgtctcgggagccccaggggtcaccacgacagcgatcgggctgggcagggtctggccacaatcgagcctggtcgtcgaggatgacacccaccacgccatgctggcgggctacctgcgagcctcccagcacgccgaaccgaacctggccgcagtggcgaacctgacgtcgactccaaccaacgcccaaacggtgtgggaatctatcgccagacccctacccaccgatgacccagtcggcgggctgcgacgcaaaggcatcctcggcccgcccacgccgtggtctcgcgcaggcatcgacccccgatggggattcatgctggccctgtggcggcaactggaggaggctggcatcgacaccatcatcgatttgggtcgcctagccacaccactgacctcaacgccacacctgatcgccgcacccatcgtcgaggacgccgacatgatcttggtgatgatcgaggcgacactacgcgacatcgccggcgcccgcacgatggtggagggactcgctgagcagatgaacttggccggcgcctaccgacgtctcggactgcttgtccaccgtggcggccaggcccgcggcgtcgccgagttcaatgacaaggagatcacctcggcgttacgactcccggtcatcggggccattacccacgacccggccggagccgcccaactctccgacggggtcgggcagcggttcgacaagtcacgtctggcccactcactatcaaaggtggcggccagcctcgtcgatgccataaacaagcgccacgctgatgacgaggaggatctgtgatggccagttttgctgataatccgttcgacaagctgcgctcccaggatgcggcaagagcttcggtagagcaggagcctgatgccggattagcgtcggagttgttttcgacgtcgtcggggtgggccagctctcagcaggtgtcccaagctcaaccggtgatgacccgttcggagaacgtggattggccggttgtcgcggagctagccagtacggccactgatgaggttgaggctgagatcagcaggtggagttccactcatgatggggtggcgacgctagacattcgccaggccatcgcggagcctgctattgcctcggcggtgtctacgtatgctgaccgacgccagatcgatgtaggggagacctggcctgatctggtacgccagcgataccgcaaggctgtgtgggatcagctgttcgggatggggcggttgcagccgctgttcgaaatcagcgacgccgaaaacatcatcgtggtgggtaaccatgaggtggttgtcgaccacaacgatggttcccggtcaacgctgccgccggtggccgactcggatgccgagctggaatcccagatcgcccggatggcgaggaatgcgaccccgcggcgagccttcgacgccgatcacaccgatgtgacgatcatgcaccaacagaagttccgtatccacgcgatctcttcggaggtgtcgttgcaaccgtcggtggtcatccgccaacatttgctcacccaaatcagtctgggggacctgtcccagcggggaatgatgccggtggaagtggcccggttcctcgatgaggcggtacaagctggcaagtccatcgtggtcgccggcgagcagggggcaggcaagacgacgtttttacgagcgttgatccacgccattccgatgcgggagcggttcgccacgttggagaccgatcaggagttgttcgctcatctgatgcctggccgggaaaacacgctggtgctgttcgcccgtgatggtaacggcgaggtggatccggcgactggcacccagcacggcgctatcgagatcgcccagctgattcctcctagcctgcgccaggcgttaactagggtcattgtcggtgaggtgcgcggcaatgaggcttcggccatgttccaggctatgcagtcggggactggcactatgagcagtatccactccccgcgagcctctgaggtgccgtcccggctagcccaaatgatttcgatgggcccggtctacgatctggatcaggccatgctgcagatcggtcattcgatcgactacatcgtctttgttcgtaagcgtgacctgcctgatgggagccggctgcgatttgttgagcagatccgttcagtctcgcctggtgattcgacaactcccagtcttggcgaggtgtacacggctgactcgtggacaggccagccgcttacgccactcatgcctggttcggccgccgacgagctgtctcacttcgcccgagacctggattactgcgaggcccactgatgaacaccccagcgctgatagcagccctcatcgtgaccggcctgggactgatcatggccatcaacggcctgatcccggccacacccaaacccggcaccacgctgacgctgtcacagcggtgggcccgggccacccaccgcccagccggggcagccgggcgccgacgcgacctgcgctgggcgctggccggtctcgtcggcatcgtgctgttcgtcctcacaggttgggtcgctgccctggccctgggccccatcaccgtgctgctagcacccaccctgctgggggcggccccaccgaccgatattccgctgatggaggcgttggatcggtgggtgcgtcaggtcgctgcggtgctgccacaggggcgagacatcatcacagcggtgcggatctcacggccgcgggccccgaagctgatcgccgggtcggtggatcaactggtgtcccggttggatggccgtatggagccgagggaggcgttccagcggatggccgacgagctggactcggctgaggctgacgcggtgctggcctcactagcgttggcggccactcatccgcggggagcctcgacaacgttgaaggctattgctggcaacatccaacagcggttgaaagtgctgcggcaggtggaggctgagcggtctaagccgcgtaactcggtgcgccagatcacactggtcacgatcgccatgttcggggggctgctcgtgatcggacggtcgtttctggccccgctggcgacccctcccggtcaggtgctggtggccgtggcggtggtcatgtatgtcatcgcactagtgcagatgtatcggatggcgcggccccgtcgacgcacccggatcatggtcaggaggacccgatgaccattactgctttgtccctgctggccggggccatcgtcactgtcggactgctggtcatcgtggcagcgttccgcccagccccaggccctgacctggttgccgctctggaggtggtgtcgggtcgcacctcaagcgtcgccgagaacgtcgaccagacccggatcgggcggataggtcgcagcgtgacccgcacattccatgtgtcggtgtccccggccatgcgggccgcactgcgactccaaggcacgacccccgaagcgttctacggtcgacgcctgatctgcgcactgatcggggcgatcctgccgtggctgctcaacgcggtagccatcgcggtaggggcgaattccccgaacctactcatcccttcggcgctgtgtgtggcgttagctggcgctggatggatgctgccggcagcacggttgaaggctgcggccgggcccaccaacgatgactcgttcgaagcgctgctggtattcatcgatttggtcgtgctggaacggctcgccaacgaaacctccgtcgacgcgctcaccaatgcggcaaacatgtcggactcgccgctattcgtccagatccgtcaagtcctcaaccgtgcctccctggaaaacgtcgacccgtggaacgggctagaccggctagccgaggacatcaaactgcccgaactcaccgatgtggtctccatcgcccgcctccaaaacgaaggcgcctccctcgtcgacagtttccgggcccgagtcgccgagttgcgcgacgcctacctgctgcgcctgcaacaagaatccaccgccatcacccagcggcttggtttgtggacgatcctgcaagccggctcggtcatgctcatcttgctgggggcggccgccctcacactcatcacagccggataaaccgacatcgtgtcgagcccccatatgggccgcgaacctttcataatgatgcctgtaagcaccacaatattgatcacaacctaacaatgaaggagaaatcatgatgaccgatctcgacctggctaaaaaacagatcacctggctggcggcgcacctgcgttcccggatcgttgacgagcgtggcggtggtagctctaccgtggagacactgatttggattggtgtcatcgtggcgctggtgattggtgtgggcgtcggggtgacggcctatatcaggtcgaagatgcctcactgacgacgatgcgtagcaggttcacaactgatcagcgtggcggtggtagcgcgtcggtggggatgctcctgctgatgcctgcgatcatgctgctggcattcggtgggatcgaggtcgggatgtggtgtcacgcccatcagtcgaccatcgcggcagcccaaagcgccgcggaggctcagcgtgtcgtccatccggtcccggggtcggcacaggaggcagcctcgcagatcactagtcatggcggggtgcgtgatacccggatatcggtcagtgatgacggggccactgtcacggtgaccgtctcaggtcgggccccatcgatgctggggctgcatcttccggctgtgtcgtcgacagcgtcgatgcccaaggagcgcctgtcgtgaggcgaagtgagcgcggtggagcaagtctaagcgtcgaggtgctcatgtgggcgccgatcgcgctggtgatcatcgggtttgttgtgggtatcggccggatgtcgatggcccaggacgcggtgaatggcgcggcgggtgctgcggcccgtgcggcgtcgttggagcgtgatggacagtcggctcagtctgcggcgcagcaggcggcgtcggcgaacctgtcgtccggtgggctggcatgtgcgccgaatgtgagcgtggacacgtcagtgtttgcccgtcctgccgggcaggcgggcacggttcacgccacggtcacgtgtgtcacctcgctgggtcttgggttcgggtcccggacggtgcacgcaacggggtctgccccggtagacacctatcgggaaaggagaggctgagatggcccgtgatgagcgtggtggcggctcggtgtcggtgtggatgctgctcatggtgccggtgattctggtcatggccggcctggtttttgacgggtcccgtcagatatcggcaacccaggcggcccaggacgcggcggttgcggcatcccgcgccggaactgatgcggcagcgacaccgcagcttgctggccacgacggggcggccgtagcagtccaagcggcccgccaggcactatctgctgccggggtggacgggtcggtgcaggaggacgggtcgaccatcacggtgaccacgtctcaaagtcggccgacagtgttcctgtcagcgatcggaatcagccaggtaagggggcatgggcaggcccatgctcagcttgtgggaccgggagaacgcccatgacagtgatacgtcgtatcggtgccctggtggcactgctggtggtgatagccggcttaccggccgggctcgtggccgcaggcgccccgctagtaccggcgggcctgtcatgggcccatgtgcggcatctgttggttaccccagacatgaccgggtcggtgctggtgtggctggtcagcctcatcggctggatcgggtgggcatggttcgccctggccgtcgcagccgaagcggtgacgatgctctcagggcagcggctgcactggcacatgcccggccctcgcctagtgcgccgagtggcagccggtcttctcattgccgcgttcgcggccgcaccggcagccacaagcacggctcacgccgccgaggccacccatgtggcggtcgccgcccaggctggaccggcacacgcggcccccgcccaggacagccccgccaccacctctcaggccccggacgcctccaccactccgaaaatctggaagacctacacggtgcgggccaacgactacctgtggaagatcgccgagcactactacggtgacggcgcccaattccgtcgtatcgccgaagcctccggtatcgacccgcactcagagctgaaagtcggccagaaactgatcctgccggttcctaagaacacggccgcagttcattcggttaaagcgggggagtatctgtgggagatcgccgagcactactacggtgacggcgcccagtaccataaaatcgctgaagcttccggtatcgatgcccattccgatctagccgtgggccaaaaactcgtcatccccgggcccctccgccacgacgccacgccgccacaccactcggcgtcgacccacgcgaaggccgccaccccagcccacacgcccacgcgacggcctgcgcctgcccacaaagccacgcccgccccgacgccggccaccccaactactccgacccacacggtgaccccagctccggcctctgccggccactcgaccagcgacgagcacccactccatacggataccgccgcagcggacaaggccagcaacgaggacgccctgtccccaatccaggtgggtttgaccgccagcgtcggactggtgctggtcgccggactgatcaccaccctcaaccgccgctaccggacccggttcacccgccagccccgcggcaaggccatgaccctgcccagcccggacgcccaaactgccgagatagcgctgcgcagcaccggggcgactgacactctgacgatcacctgcctcgaccaggcgctccgcgcgatcggcgcatggtgccaccactgcgggcacccgctgccacccctgctggccgcccgcgtcgatgacgaccggatcgacctgctgctatcccaggcggcccccgaccatcccgaggcggtggagctggccgccgacggatcggtgtggaccctcaccgccgaccggatcgacgacctgctagcccacaccgatgacaaccaagcggctccgtggccgtctctggtcacactgggacgcgacgacgacggcgcccacatcctcatcgacttggaagccgcaggaaccttgcacctgatcgccgatgacgaccaggtcgacgcggccctcgccgcgatcgccgtggaactggccacctgcgactggtccgacgaagtcaacgtcaccctcgtcggccaggtgtgcccgggcctagaagacgcactagagtctccgaccctgacccgcgccaccgacgtggacaccctcctcaccaccctagaagctcgcgccgacgaccagcgacacatcctcaccgaaggaaaccccctcgccgctcaccgagccgaccccgccatctccgacgggttcgacgccgaagtgatcctcctcgacaccgaactcaccgaagaccaccgcaaccgcctcgccagcctcgtcgaggctcttccccgcgtgtcagtcgccgcggtaacaaccagccccaccagctcagacgaatggtccctcaccctgacaggtgacccactagccgccgacctggctcccctcggctggcacatccacccccaaaccctctcccccgacctgtacaaccgcatggttgaactactcgccaactccgccgccgcagactacgaacccgccagctggtggaaccacgacgccgacgacgagcccaccaccgaccccaccaacgaggaagaatctaccccgagcaggcgagcccgcccgaatatccgcctgaccaccctgaccggcggcatcgacctatccagcgtcgacatcgacgacatcatcgacgaagccaaccaggccctcgacaacaccgaccagaccaccaaccaggttcgcgtcgacaccaaccaacccggcaccgacacccccttccccatcgacgacatcgacccgctgagctccgaccatccggtcctatccatcatcggccaccccgacatcacaggtgccactggaaccgttgggcgctccccgtggcgctgccaacagttggctctctacatcgctgagcatccgggagcatcgggggcgactatcgccgatgatttggggctatcagcgtcgacggtgcgctcgattgctacacacctgcgacactggttgggagccgacgatgccggggtggcttacatgccggcggcgacgcgcggctaccggctcgatgagcggatcgtcacagatgtggacctgatcgacgctgctgtggccggggcaggcattaacaccgctgagacggccacactggtggccattttgaagctgggccgcggacgggtcttcgctggggttcctgactcggaacttcgccagttcagggcgtcgatgtaccacgtggaggcccgcatcgtcgatgctgccctccaagtgacagaccgggccctggaagccggggacctggggctggcccggtgggcgttgacccaagggctactggtgtctcccgatcatgaggacctggtcaccggttgtctgcgcaccgagtaccaggccggcaacatggacaaggtttccgagctggtcgatcacctgtcggctaccgcacgacgcctgggcgtcgatttgagcgccgacaccacccggatcatcgactccgttattacccatacacgcaggagagcatcatgatctcccgttgcactcatctccgtcaggaaggttcctatgcaccattatcgtcttggtatcggcactgccctcatcgcggtagcagccgtggccggctgtcgctcaacagactcgacacccacaccacctccatcccgtgtctccgccacgacatcagcgagctctaccctcagcccgaccccgtcagccggagcgatcagtgccgccgacgccgaaaacatctaccgcaccgtccaagctaacaagatcgcactgtacaaaaagggtggcctggcacccggggaacccgcacccgcgacactgtcgaactacgccaccggccaggctctcaccgactacatgacctacatgcaccaaatctcggggcagggcatcaaaatcacatcggggaactcctcggttaccgcggtgcgggagaaaaagggtgataccacctaccccgaagccgctatcgccttggaatcgtgcgaagacgacagttcgattcgtaccgtggaccgccacggaaaggctgatcatggacgcattttccatgtcgacagttggtatgcccgcgataagaagggcaccgtcaagatgatcgcattcaactcaacggaggtccccacatgcgacgtcaagtaatcaccgcggccgtactgggcctggccctggccaccacctccctgcccgccctcgcaggcggcggcgacttgaacggcagtgtggacacggatggccctggttacgatgtgcgtactgaggtggattaccatcacaccaccggtggtgcgggtgggggtgccacgacagggggccatcatgggggcaaaacccacggtgatggtgaaggtgaggctattgatgggcgttctcgcgccgatgccgaagccgaactagacgaagccgaccgtaaccaggacttgacttgtgatgtcttgctcccaccggcgccgaataccccagccggccaggaatgggcgaaagaatgcaatcccccagcgaaaaaggggcagaaggccaccccgaagcccgatccggtgttagtgggccgtcacgcggccttgcagctcacccttcccggcgcggcccctcgtatcgatccgtcccccgaccttaaccggtggcactcggcagcagtgggccaggctttgtggttgtcggttgatgaccccaccgccactacgcagaaatcgatcacgtttatgggccaggttgtctcgttgagcgccaaacgtaacggtttgtcgtttgatatgggtgatggtcatgtcgtgcactgtgatgccacgacgacatggacggagtcggtggaaccggggaccccctcacccacgtgcggttacacctaccaacaggcagccccggccgggggctataaggtcaccgcaatcacgtcgtgggatgtgacctggtcggtactaggacacacgggcacagtccacatccagaaggccggtgggcagatgcttccggtcggcgagttggagtctgttgttacacggcgatgactcctgatagtccgacgctgtatgaggtgttggaggtctgccctgatgccactgatgaccagatcaagacggcgtggcgtcgtgccgcgaaagtgactcaccctgatgccggtggcactagtgaggcgttcgcggccgcccggcacgcctgggaggtgttgtctgatcctgcccggcgcaccgcctacgatgccgacctggcgggggaggatgatcccgacgacgaagccgccgacgccttcgacgttgatccgttcacggcatggccctggtgcgccccgtacatcgacgccacccccaccctgcgccacacctgccccggcacgatcaaggccatcgtggtcgccatcgccgggatcatggccggaatcggctggcaggaagcgctggaggccgtggtgtcgccgccggggtttctgggggcgtgctggatagtctcagtgccggttgtcgtcgcagtgacatggctggcagcggtgacgggtctggcatttttcaccatggcggccatctggtgtggatggtcgttgataggtggtgcgttgctgtggggccagacgtcggtggtgtggctgattgctgcggggtggctggcatggctggtgtgtgcgtgggtgtggtggaaccgtcatctggcgtggagtagcgagctgatgcaggaaggcaatttgtacggccttcccgaggaagacccgttgtggggcgaggccgtggagctggtagcgggacttatcccctctgtgcgggcgatgtggtcgcacgatgggcagaccgtgactgtgtcggctggccggcgggtggcgacactggggatgccgatgcggggatggcgtggtatcgagatgcgcggctggaatccagtgggcgccgatacgtggtggatcgttgaccaggtgggtagttggctggtcgatcaggatgagccgatggtcgttgacgggagggtgctccatgaggcgtgggaacggtcgcagatggtccgttcaggccgctgagaaaaaatttaggtccgccctgcatatcggggcctcttcataccttcaaaagtgtgaagggaatacagactcttcgactggaattaaaatggtatatggcgtgtccggtccgcacccagctccacgatgcgccataggggagccataacttcaccaatcgtatacgatatgagtgtaggtgagcatctaccggtggccgacagtcagatacaagcatgggcggatgaagcagaagctgattatgacctcagcatgcttccgccgtctcgacgtggtcgcccaccggtggggaggggcccgggcactgtggtccctgtgcgcttcgacgcggacactctcaaggcgttgtcacaacgagcccctgacgaaggattgaccacgcgttctgacgcgatccgtgctgcggttaaccagtggctcggcctcggctcgtaaacattatcggcgcgacaaccttactgatgacgctgttggttacgccgtagagcacatcttgtactcgtgggcgctcgacgatgctgatgatcctcgttgctggatgatgattcggtgttgacccagctggcctcctcatggagctagttatcctcatctacgacgatggctatgaactcctgatccacgccatgaaagcccgccctcagtatctgagctacttcgctatctagtgttgttgggcgagttgaactcaacttttctccgacgcaagcgccaataaaaggctgatccatccgaataccaccaaacacggctgacgtgtggaacagattcagcaagacagggtgcggtgctcgggtgcgttggggagatgaggatattcaggcttctggcgggatgtggcttgatgacgtccaggatcaccggttcggttttgaaggtgccttgcattaatgtcgacagggtcgtacgactcgaggactggatcgaccagcccgttgcgtctgaagaacttcatccaccccggtggagctccggccgcgtactggtgcaacggatcattagcatgggtagcgtgagtatgccttcgatcgtggtcagtgctgtcatcatccaaggttctgacgggcggcttctcactgtccgtaaacgaggcaccgaggcattcatgctgccaggcggcaagccggagcccggcgaggactcgcgtcaggcagtagtccgggaagtgcacgaagagctcggcgtcgcattgtcttccgacgacctgcgtcgggtgggagtgttcaccacgcgagcagcgaatgaggccggccatcaggtggtggcgacgattttcacccacaccccggttgcggtgagtgagccagctgctgagatcgagcagattcgttggctcgattggagtgtcgacgccctgcctgatgacctggccccgctgctggtcgaggcagtcatcccgtggctgcggcgccgtatccggtcggtcgctgtattcacgggtgcgaaggatggaaccgaccctcattatcgtgtcgaagcaaccgccttgggccggggtctcgcacacgccgggatcaccctggtttatggcggcgggaaggtcgggatgatgggtgctgttgctgatgcggccctcgctgctggcggcgctgtgatcggagtgatgccgcagcacttggtggacggggagatcgcccatcctagtctgactcacctcgaggtagtgcggactatgcatgagcgcaagcagcggatgagtgacctagctgacgcgttcgtcgcgctacccggcggcggcggaacccttgacgagctattcgaagcatggacatggcagcagctcggtgtacacagcaaacccgtggccttgtacgactcgaccttctgggcaccgctgaccgcgctactcaaccacatgaccatcgaaggcttcatccgccctgaggaccgcgcctcgctcgtgatcgccgataccatacatcagctgatggccgatcttgagggatggaccccaccaccaccgaagtggcgctcgtgacatagaacaaatgattctgactatggctcattgacatctgcgcagcggctactagctccattgacttcaaatcgggccttggccgaggctcggttcaggtggcccggaatggatccccacaaattgaatgctcatgatcgaggtgatgaacgcccactctattgtcctacgcccggttgtatccagcgagcaattgaaggtgctgcgcctgttggtcgaccaggccgagccactcatcatcgacgggcgcatcttgtacgaggcatgggacaggctgcaaacagcccgtccggcccgctagaaaaaatttttagggcccgctccgcacatcccggtctgtacccacaccttcaagggtgtgaagggaataaaaacacacctaacaacaactttgtttcatgatttggcgcgtcggaccctttctgaccgatgtcgtgcgcaacaatggacccatgagttcgcctaccaagatgcgccggaaggggacacgcggcccgaaacctcgcagcgacgaggagctaacggctgtgatgttccgcgtcccagagtcagtggccgaacgtgtcagcgatatggcttgggagctgaggctctcccgatccgatcttgtgggctggtcggccctctatgcactcaactcgatgctcagacagcgcggagaggacacgattccggttccggagtatctggacaaggccgtgctcgctgcgttgtatcccgatgggttgcccttcgacgaggacaccgaggagccgggcgagaatgccgggcaggaggagcttgcgatgactggatgagcccgaacatggttgaaggccgccccgccaggcgaccttcaatcaatggtttcggttgtcagctgcagccacccttgccaggtgctgtggttcttctccagaggaggagggaccgccatgaagacccagaagacctagaagatccaaaagaaccggtttcggctgttgcttcggtcttcatggtagctgatagcccgcgtcgttggaagtgcgacgacgccgatcctcatcggtatcgcaccctgttccagggtcgagaatgtgaaggattaacaaccatgacaagtcatgagacgccctcccggagggcgtcatgaccgctttaattcaagctctgccgacagctgaactgtctgctggacctggtgctagcagtccagctagaccctctgctgagggcttcatcaagattcaccacgacctcattagtgcgggcgtgtcgggtaacgcgatggcgttgttcgtcgcgttacgtaaccagcccggctgtgatcagtggacccgtcactcgtacctgcggctagcccaatggtgcggctgggatgggctgtcggaggcggcgggctgtaagcgggtgcagcgggccgctgctgagctcgctagcggtggttggctggaatcgcgggtcggccatgatcgtcgcaccgctaagacgctggtgtggcatcggttgaccagccccgacaccgaccgctgggagcaattgccgcggattgtgtgggcgaggatctgccagatcgccggggagacgtcgggagagtgggtgaggcattggctggtgtggcggatgctggccggtcgtactggtgtggctcaggcccctacgtccatcgtggcccggttcctgggctgttcttcgcgccaggtctctcatatccgtggggctctcgttgatgccggtctgctcggctgtgacgaggtctcgggggcggcgagccgggtgtggttcccctcgatggccgaggagtgtgcagcggatcgtgaggtggtcgatggggccgtcgtcgatgctgaggtgggctctggtgaaggtgtcgaggagggcggggaacccctgtcgattttgtccacccacccctgtcgattttgtccacccacccctgtcgattttgtccgccaagtattagacaaaccattagacagtgaattagaccctgggtcgcgtcagcgtgtgaactcaccaacgcgcgcgcgcgcggcggccgagccgccgaagccaaagaaacccataccaccaacgcctgaaccagcagcccccgcttcagacagtcctgtgtcagcgcacgctgatgaggctgccgagttggcgtggcagttcgtggggtggtgtcctcagctggtaggggcaccgaagaaggtgcgtggccagctccgccagatggtcgctgccgagatccgccggaatccgggctggctggatgcgccagcgttggaggttgttgcccagcgggtacgtgctgaaggtgcgctgggggtccagcactgtgagattgtgcgagccgagctgcacggggtgatcgccgaccagaaggccgcccccgcccgccccgacgccctgcacgcgcgggagcccaagtggtgggacgacgtgtactacgaaggaaacacaaccgtgtggtacgactctgacgaaaccagtgacgacgacgaggcgtggaaccggtcgcaggtatgtcatgttgctgagcgtgacgacatggctggcgggattgctaccaacctgctggcctcccacgctgatgatccgatggcctggctgactcgccgtcaaaccatgctgatggctcgtttcccccacgcccagaacgaggtcatcgcgatgtgccacatcgtgcgcaccgccctggaggccgacatggccgccggaacccggtgggaggactgatgagggtctcccggcgcgccctcatggccgtggcccgtgccgacgctgccgcagcagaccatgccaccggccgatgggtggccacagccaacgccaccgtcgcccggctgaccggactgtgcgaacgcaccgtccaatacgcccgcgccaccctggtccacctgggcctgtgccgcgtcgtggccaccggccgctacctcaccgccgacgagcggcgcacggctgctcgcacccatggcggccgccagatgcgcgccgcctccacccgcgtcctcaccatgtcctgcgcaatcgtttgcgccctaccccgaaggggtcaccactacaggaaagttaagttcctagatggtcaccaacgcacgcgcaggcgcgtgcgaaggccagcaacaccagagaagaaacccctgtggctgcaaaaactcgcagccctcctcgaccagcacctgccctggctggtgagaaaccatcacatcggccgactgtgccacgccctcaccgccctgggcatcgacgaacactggcaacccgcagacctcgacgccctcctcgacgccatgaaccgcaggaaccgtcgcctcggcctcgacgtgccatgcgccgacgaccagcacaaccccttgggactgttcatccatcaggcccgagacaccctcacccacgacaacccccatgaacgccgcctagcccgtgacgctgaacgcgcccggctcatcgacgaccaactccgccgccgcgcagaaaccgccacctgcgcagcccgcctcgcagccgagcacgccgaccccgactaccagacccgccgtcgtgaacgcagggaaaccctgcgagccacactcagggccgcccagcagcatgtcaggacacactgatacccgctcatacgcacaccatgaaacacgacaagccacctgacagtatcagctgcaagacgcatgacaacatagaaggacatgatgaaatacacatagacacaaccccgcacagcagtttcgcaacaaatcatgatagtctcatggcagtatcgcttgatacacacatagcatcactcccacataggcagttatgctgatatactcctactaggttatccgtccaacatgctgagtgggttcctgtacagcatgaaaggagcatggcatgatatgggccgttctcaactgcaagggtggtgtcggcaagacgaccagtgccctcctgctggcggcagccgccgccaagcagggccacaccaccctggtggccgacgctgacccccagggcaccgcatcccagtggtcagccctggcaaccaaaaacgacgaacccctgcccttcccggtgcaagcggtcaacatcgccaccatggaggcactgcccaccaccaccgacgcccatgatctcatcctcgttgacacacccccctcggcaggcgatctgatgttccaggcatgccgcatcgccgacctcatcatcatccccaccgccacctccggacccgacatctcccgaacatgggtcaccatggacgccacacaaggcacaccacgcgcgatcctcctcacccaaaccgaacacaaccgtgtcgtctaccgccaagctcgcactgccctcgccgccgacgacaccgtcgttctcctggaccacgacatcccccgccgtgaatccatccgcacagcatggggcaccaaccccccagacgacgtcatcacctactacctgcccgtcctcaacgaactcatggaggccctgtcatgaccaccaagaaaaccgacccattcgcccgccagaaagcagcagaagaccgcgcccaccaactccaagacgaagcccaacgccacgcccaccccaaacgcgtcatcggccccaccgcacgattccagttcgtcctgccagccgacgtgctcaccggcctcaaacacctcgccctcacccgcggcaccaccgcccgccaactcaccctcgacgccctcgacaccgcctacggcctcgacaccctcgccaacagcgggaagaaaacccacccatgacccgtgggtccccctgccaccaccccctcgacggcaactgtgtgcgagccacaggcccgcacacaggcggcagcccagtgccgtccccgccaggaaaggaactgaacttttctggagtgctggctccctatcaccccttatggtgctatcagatccagtagcgccagcccgagaggaaacccatgagctacatcgtccgcaccggaaatctagccggcacccccgagctgcgcgaggggtagccgacacggcggaccgtgcccctgacagtaagcggcactactggagacatcaccatgaccgctcagatcctcgccccgtgcaaccagaaggctgccgtcatcgaaggagccctgccatgaaccaacctaccccccacaaggccgacgagtcacagacgagcaacaccacgaggaagtggcggcacaaggtgtcgttctaccaagacccggccgacaccgaccgagtccgcggagcgatcctccacaccatgacaaccgaaggcaaccggaacctgagccagttcgtcaacgatgccgtcatggccaaggtgaccgaactggaagcaaaatacaaccacggcgagccattccccgccgtgggagcccgaggactcccccagggcggcgcagccgccaacagataagagggcggggaccaccaatagcagtcgatttcggatccagatcgggtagacaggacccatgatgaatttcatatcctccctgctctcggccatcctgaccctctttgcgatggtagccgtggcgataggagtggtgaacattgtgccgggaatatgcgccatcatcggtgcacggaaatacggcgaccaggaccgtgtgcgggcaggacaacgaaagatccttcttggtgctatcgccttggtggtagcagtaggcattcacccgtgacccacggttaccggaagccccgccgcaatcgataccactgtcagtaccatcaggggcgataggggtcaagctctccttgtcacaatcccttccccggcagcccagtaaccgtcgcttacagccatacatggatatgcgcccattcgtcggcaccgacgccgtgcgggttggcgacgctgacccgtctgctcacaaacgacccttccagcccagcaccacccactacaccgacacgatccacgaagctgaaaccgaacctcccatccccgtccgaaacatcaacgaactcatcaaccccaccaaccatgcatgaacgcacgatcgcctaccggccagccttcctgcgcgacgtgaagcggctcaaaaacaagcactacaacatgaacacacactcaaatgggcggtaaggtcacgaagtcgacgtggctgcctcacggatggcttcggcgagctcttggggtcgactccacatgggccagtggccggttggcagatccatcgcggtgaagttggtcaggtgcgcgacggcgctgaacatcggattgcctgctgcggccagctcgaggacctggacgctgggaatggagcagcagatcaacgtggttagtacatcatggcgagcgctattggacagcgcgacccgtgcccgggccacttgcgcgggttcaggaaccgcccgtgcccggaaccggtcaaggtgctcgttgctgaggccctctaaactggcctgcttgccgagagtatcgaagtcaggaagtggcagctcagctgtttcctcaggtagatctggtgcgaaggcacctccatcgctcatgggaccggagtccacccagacgatccgatggaccaactctgggtgcctgtctacaactaggctcaccggcccgttcgcgccactgtgtcccaccaggaccgcatcgccgcccatctcgtccaggatggctgagatggcgtcagcttggtcgtcgagcgtgcgcgtagtgcgctgggtgtcctccggatcgaggccaggcagcgtcagccccacggctcgactgccagcagtgttcaataactcgactacctcgtcccaagcccaggctccgagccagtaaccaggaacgaggacgataggccgatgctggtcaggtcgcgatgttgaagtcatggagacatagttgcacagtgcgcggacaagggagtggcactatttctggcatgaatttagatctgggtgtccggtgaggcgatcagaacgcctccatgtactgtccgagtgtctacgatgcagcggacacagtcgagcagctggctcacaagtttccaggtgtccttctgcccctatgagggaagtcggctgctctcgcaacctttgagggctgctctggggtcggaaccagttacagatcgttcaagttccgggaactaccgccggtcacgctgattgattcccgggcgatctcgcttctgacgacagtggtcggtaaccgagaggcgtcctactctgaccccgctgctgcggtgagtaaatcacgggcgtcccggatccggccacccgtccaagtgccagccagcttgatcggctaggcatcgtcaaggagcgacgatgaggtgatgatgcgatgtgagcgcaccgcgaagtgaggtataaagaagccttcccgggcgcatgcgtcgcccaggaaggccaggttggcccctggacggctgaatggttgggcggatcaggctgtagcggagacgtgcagtacctcgtaggcgatggcgttggttgggctctggtctgcatcgtggctactgagttcgacgaggatgacggtccaggtggtgatgtcgacggcggtgacgcgggcgatggtggaatcagtggatgctgcaaggaagtcggcggttatgtcttcgatgcagtgggacggagcagtgctggtgggcaggggcacggtcttgacggtcaggcttcgggcagcagagtaatcggcggttccgttaacaagctggtggacggtccagtcctggatcgggtgccggccgaagtcgcgtacgatagccgagtaaccaagttcgccccagcagaactggcgcatcccctctatgtcgcgccagacgtagaagggcgcgtaggagttctggggtgcgcctttgaccttttcttggatgaggtaggccttgaactccagtccatggtagccgtccatgaggtgtccagtctggatgacgcggtcgcggatgatctgcatgtcatagtcggtgggcagggtgatctgatattgcatggcgtacatcagcggttctccttggtttcgtgggagtaggtcgtggggatgacgggttcctgccaatcgatggttgacaagtcgtcggcggcttgttggtaggtaaggtggatcattggctgtttgagtgcagcgccatgccagtgtctctggccggcgtcgatccagatggattcgcccttggtcaggtgctggggtgcttgtccttcaatatggaccagggcaacgccgcccgtgacgtagaggccctgtcccttggggtgtgtgcctcagcggcaaacgtgacggcgtgggcggcacgcccggcgtcttccgtggcacgatcggccggatccatggcggcgcgcagctgctgttctgcagccaggcgtccaggtcacggcgggcagcatcgacacccagggcagcctcgacggcttcagggctacgacgctggccgggctggttgaccgcagaccactggtgccgggcgtcgtccagatcatggccggcggcgtcgatgagggcggtggtggcttcggcgcagcatcgcctgatccactccgaacgtgacaggccagctgtctcggcggcactgtcaatgcgcgccaggagagatttcatgggcgctcatctgtagcctccagataggcgttgatgtagcgcagagcctgatccgtcatgtcgatggcggctgcctcggcagacgacacaacgggctgtggatgataagaccacccaacatagacggcgaacatcaatttctcgacagctttcatgaggtccccggcggcaaccgcatccgcctcatcatccgaggagaaccacttcaggtctgaacggctgtacatagcccctaggtcctgatgtgggtcgaggtccttggaatgatggaagttcctacacacccatcgccaaagacctcaacatggacaacgctaccttcaccactccctcatctgtgaagagccagtttatgcacggtgttgaaagaggcgtcggtctacgacgaatgcgggttaatggtcttgcggtgtggggcgctgggcgatggcatcgagaacgcgtgagtgggtggcgatccattccgcgtcggggttgatgttgcgggcgacggtgtcgatcgctgttacgtagtgggcaagcctgcgaatctcagcttgttggtcagggtgatcgctgatgagaggctcttgatgggaggcgcggttacggacgtggcggatgagctccacgttttcctcgaagtcgcgtcggctacgccccgggtagtgaggcatacctccgttacgtaagtcagtgagagctttccatacggttgcttccaggcgcggggtgagcagaaagcgccagttgtccagtgacagactcgccacgatctggatcaggggtcgcatcgagtcctcgcgcgcccgcagtcgcttctcggccctggcgacgttacgcgggaaaccaccgagccgatagctcggggattcccaccaacgccgtatgccagtatcggcgctcaggcgcacgtcaatgaagtttctcaggagtacctcgacatggctgatgtcttccaagaacgctttcgagatgcgggtgttccacacgtaccacgcatcgactggttcgatccggtagcggctgagcctggcgggtgagaaccactcctgcaacgtctcacgactcaccgtgggagcgtggtaggattgatgacgataggcctcgggaaggtcaatgccgcgaaatatcggtatacccccgaggtcattgttttgcccaggcccctcctcgcatacttgcggggcgtcattggctgccgtcatctcgtctcttcccggtacgtggctgtccatgttcacgggcaggtacggcaatgaggttcccgcacacaaacctctaccaagcatacgctggcaagccccgacgagacgacgcctccgcccgccacaccaacggtcaccgccacggccacggtgaccgtgaccgtggcaccgaaacccaagccaaagcccaaggccaagccaaaggtaaaacccaaaccgaagcccaaggcccattcatgatcgcagtgcccgatacaaggtggagcggcccacaccaagctgggccgccaccttcgttttcgggacaccctcggcaacgaggcggcgagcgcgggcaagctggccctcgctcaatgccggtttccggcctcgatagcggccctgcttcttcgccaccgcgatcccctcggcctgtcgttcatggatcaacgcccgctcgaactcggccaaggcacccagcagatgcaacatgagctggctcaccggatcagcggaccccggcccatagacctgcccttcaagggcaggcccgttatgctgtcagcagatctgccagttgtgggtgctggtgtcgtagcagacgccggtgtcggtgtcgtcggtgcggttggtggcccagccggtggtggagtcgtcgagggtgatgtggtggaggtcgggttgagtgttgagccagtgagtcccctcggcttggggtaggccatcgaggatggctagtaggtgggagatggtggctgtgcgggtgagcgtgaggatggttttggatgtgttggtggtgtcgatggtgaagccgtagttggcgagtgcagcggtcacatcggtgggctggtcggtgtagatgcggttggtgagtacggagcagttggggccttcgccgtagatgctgatctccacgctggtgccgtggtagtgggcttcgtaggtttcgtcgatcatccatgttgtggcccagtcggcgtcgacgagggtgtagggggttcgggtagtgggaagtccgatgtagggcttggtcaccatgttgacgtgtgcggtgtacttcatcgttgattcctttcccgatctctcgttctgcttataaatatatagcccgatagacggactgtcaagagtactagataaataatctaatacgcttgacttgaaggatagttgagagaataactcacatgtgagatgctatcagcggcgcagaatgccccctccgggccccttgctgcccctttgggtggccaaggctgtaaaccgcagcgatacaggcttacaggtgccccgaaggggcgcctatccacgcgctcacccgacgccgaaggcgtcggca

SEQ ID NO: 32 - DNA, 26620 bp, Propionibacterium acnes
  source 1..26620: mol_type = genomic DNA
ccttgtggacaccacgtcatccacatgacttgtgtcacatgattcccggaccatcatcaagcagatgctcacccaactgtaatgatttctgttctgaatctggacatgctctgacctgcattcaatgatcaattccgtgcgatattccacaacgcacggggaggtcgcagacaatgacaacagaaagcatccccacgcggctgctcgtgtggcacgagcagaccgatccgaccaagctcctcaggatcaccgacgcgatcaggaggggggatccccttccccccatcgaggccatggcgatcggccacagattcctcgtcctcgacggtgcgcaccgggcccaagcccaccagtactgccatcgatctgagatccgagcccgcctccacaacctccccctcagcgcggaaataccaggctggagccactccataccccgcgatgcagcagcgaaactggctcacctactcctccccgtggacgctctcggtcaggcggaaatcgtcctgcacggggtgcgccgtcaggtggggaccgcttcacaacgaccgcgcgacatctttctcgcctgccaccggatcgcgcgagttgcctacgcgcatggaatcagacctctcggcccggagttctccaacgctccgacgatcgacgccgccaccatgacctggcgcccgccgaacgtgggcacgttgtgggccatcgccagcagtctcggacccctgcccgcaactgtgacccggttcgccccgatcctccggcacgacgccatcggggattccgcgatgacacccgtcacctccgccgcgtgacgacccgcgccaattccgccccaccactggatgaggggcagccgcgtggacgatgctcctgttcaggcagggactccatacgagaccaataggaaaatcatgatcaaaaacacaagccctctgaccgtgaaaaatgtctcgaaaacattccgtggctccagcggagaagccatcaaggccgtgcaagacgtgtcattcaccgttgagcgtggtgaggttgtggcattcctcggcccgaacggcgccgggaagtccaccaccatcgacatggctctcggcctcacccgccccgacagcggccagatcgaggtcttcggtactgacccgctcagcgcggcccggtcgggacgctgcaccgcgatgacacagaccggcgggttgctgcccgacctcacgattgggcagaccatggagatcatctcctcgctctatcgtggctcccacatgaatgcctgcatggagcgagcaaggatcacgcatctggccgatcggcaggtgtcgatgtgctcgggaggcgagcgccaacgacttcgcttcgcactggctctgctgcccgatcctgacttcctcatcctcgacgagcccactgcggggatggatgtggaggcgcgccgggacttctgggcagagatccacgaggacacgcgtcgtggtcggacaattctgttcgcaacgcactacctcgacgaggtggacgagttcgccgatcgggtcatcctcatcaaggagggccgcgtcatcgccgacgacacctccgacgcgatccgcaccatgtcggggggttgcaccgttacggcgaccattcccgacttctccctggcacgactgaatctgccgggcacccaactcatcaagcagggcggcgcacgcgttgatctgcaccatcccgattccgatgccctcgcagcgcgagtcatccagctcggcggcaccgacctgcgcgtggtcccccgcagcctcgacgacgccttcctcgctctcacctcaaccaccaaggagtcctgacatgaccgcccaagcgcttcccgcagtcgccactcccaaggcccgccaccgatccgccatctcgctgaagtacttgtggtgcgagatgcgtcgccccttccggcgttcgacgatgctgttcaacctcgccctccccgcagttctgtacctggccctgttccgcaccgtccacaccgccgagctgccggacgggaacttcgcgatgtggatgatgatcggcatcgctgtctacggagcggccactgcgagcaccagctacgcagcctccatctccgtcgacgaggccaacgggtggacccgcaccatccgcctgacgccgttgtcgtcggtcgggtacgtgctggtgaaggtcctctgcgccatggccatcgccctggccccgaccctgctcatcggtctcatcgggctgttgaccggagctcacggcacgctgcgggtctgggtaatcggactgggggcggcttggctcagctcagcaatcttctccgccttcggcctggctctcggactgtccctgcgtcccgaggtcgtcatgcacgtccccggcctggtcatcaccggtctggcgttcctgggcaacgtcttcgtccccctcagcgggacgatgctcaccattggccgctggagccccgcctacggcatcaccgcgctggctcgttacccgctcaccaacggcatcgacatcgggggcggccacgactccctgacggctgccctcatcggcaccttctgctggttcgccggattcgtgttctgggcctcccgtcgatttaccaagagcacgggtcgtcagtgacagattcggccgatctccggaaggagcagtgttatgaccaagcccctcattgcagtggtcaccgcgggccaaggagcgcagaagcctcgcctgctcacgccatggctcaaggtccccggcgtcacggagaagcttgctgcatggtccgctcaggccgatgtggacctcgtcgagctcggtaccagggcgaatgcagaaaccttggcagcgaccgagaatgcgcagccactactggtctgtctcggagtcctcgtctcggatctcctggccgaccagaacattgtgctcgcaggacactccgtgggcgagctgacagcagcgtgtctcgccggggtagttgatcccgggacggccgtcactcttgcacgacggcgtggactggccatggcgcgggcctgcgctctccacccgaccaccatggcggccatcattggtgacaatccggatgacgtcctccggcggctctcggaactgggactcacggctgccaacatcaacggaggcggacagattgttgcggccggctccaccgacgcgatcgcggaactggtggcgacccctcccaacgggaccgcagtcaagccgttgcgagttgctggcgcctttcacaccaagtacatgacgcctgcgcaggacgctttcgcccaagctgctcaagacgtcaccttctccgacccgcagcacccgatcatctccaacctcgacgggcaggagatccggtccggcaatgacctgcgtgaacggctgattgcccaggtgaccgcgccagttcgatgggatctctgcatccagcagatcgcggatcgtcagccggaactcgccctatcggcccctccggggaaggtgcaggcgtcgctcttgtctcggcagatcccggacctcgcgacggtctgcatcaccacaccacgggaggcagcccaggctgcacagcggatcgaccagtccgtatccgtccttcagggggcatgatgctcatccccgagtacttcctcacagcctgttcggaccatgctgagcgcctggcgatcatcacccacaatgacgttgtgacgtgggccgaactggcgactcgcgtcgacggttttcggcgctggctgcgggaccatggcgtgcaccgccaggacagggtcgttctccagacgccaagcaccgtaggcacggtagccctcatgtgggcctgcctgctcgacggcgtgacgatggtcccggtgcaccaggacctcactgcctcccaggtgcagcaagtcatcgacgactgccgtccagctctggtgtgtggcagcccggacctcgtccaactcctcaactcccccggaatgaagacaagcacacctccaacgcggccggagtcaacgagtattctgccgtccttgtcccgggtcagccccgatgaccttgcgatgctcatctatacgtccggcacgacgggtctcccgaaggggatcatgtgtccccaccggcaggtcgccaccgccgcacggatcgtccatgactgtctcgggtaccgcacggacgacgtcattctctgtcgcctgccgttgtccttcgactacgggctctatcagattctgatgtctgccatctccggtagcgcggttgtcctgcgggacggaggcgcgcaggaccgcaacctggtgcgcgacatcgcccgtcacggcgtcactgtcgttccagtcgtgccgtccatggcgtcaatgctcatcaccctgcagcgtcgtgatcagttgccgaccatcgtcagactgttcacgaataccggggcgcgtctggcacccgagaccgcgaaccagttgctcgcaagcttccccggctcccgctatgcgtcgatgtatggcatgacggagtgcaagcgcatctccatccttccggtggaggagtacgagacgcatccggacagcgtgggaagagctctgcccagcactcacgtcgagatcgttgacgctcagggagttccggttccggcgggcgagcacggggagatcacggtgtccggcccgaccgtgatgaacggctactggcaggtgccgaacagtcccagtggacgattccgacccagcggccacggcctcactctgttcaccggtgatcgcggctggatggatgaggagggacgtctctacctcctcgggcgcgacgacgagatcgtcaagcatcacggcatccgaatcagcctgcaggagatcgagatagccgccgaagccgcgccgggcgtcgacgcagtcatcgctctcaagccggcctccgactcggcccccattgaaatcgcctactgcggcagcacgagtcccgagaacctggcccgccatctcgaaaccgtcctggaccgggcgcgacgaccccaattcatccaccaactccagcagatccccctgacccgtaacgggaaaccaaaccggtcagcagccgccgaggccatccgctcaagggcgtgacggcgaaggccaacacccacagacgaaaggaaaccaccatgacccaggccgagttcaaccagttcatcgagtccacctgctccgcgacgatcgtggatcccgaccgtcctttggtcgatcagggcatcgactccctcggaatgctcaccctcatggtcgctatcgaggacagcctcggcatcgaactggatcccgagtccctcgccgacggtaggggttccacgccctccggtcttctgtcccttgtcgagcagccgaaagcgacggtgtgacgacatgacgacgatggttccttgccgccgtgtggagatgccgcaactgttcgaccacatccccggaagcatctctctctcaggagggctgcccgatctgagcgtgctcccgagcaatcagatcgccgaactgacgtcccggatcatgcgtctcggctcaagaatcctcctgcaatactccaccccttcggtctcgtcctccttggtgccggccatcctggacctggcggaacgaacatgcatgtcaccggatccgcggaatctgatcccgaccgcgggttcccaactgggcctggccatggtgatcaatgcctttgacggcgatgagatcatctgtgactgcgccacctatcccggggcgctggccgccttcgcctctgccggcgtggaaacaacgggggtggccagtgacgaggaggggctcaacccagacgcgctcgctcacgccgtcgcagagggtcgggccaatggccgccgcatcgcagccgtctacaccacgcccaccttccagaatcccaccggctccgtacagtccgagaaccgccgtgcggccctgctcaaggtgtgtgctgacaatgacctcctcctcatcgaggacgatccgtacggcatgctgtccttcgacgggcagacgtggccagctctgaagtccatggacccacagcgcgtcatctacctgggcaccttctcgaaggtgttcgcaccgggcgtccgttccggctggatcgatccgcccgccaatcttgtcgagaaactccgcgctgtgtgcgagatcatgacactctcgccatcagccctcaaccaagcgatcatcggcgagtaccaccgtcgtcacggatgggacgaactgttggagggctatcgcgcctcctaccgcgaccgagcccgtctcctcatcggggctctcgaggctgaactggcaagaacgaattgcactggcacgtggacctggcgtgaaccacggggcggcttctacctgtggttggagaacgtcgccagcaccagcggtatcgacgttgcgcgtcgcgccgccgacaacggagtggccgtggtgcccgggaaacacttcgacgcagccggacacgattcgccgagcctgcgggtgtcgttcagcaattcacgcccggctgatctggtcgaaggagctcgtcgtctcgcccgtgcactggtgggagaggacgttcagaaatgactctcgcgacacgcaccgccaccgacaccctgcagcagaccttgccctggggcacccacgaacgtctcgtcttcgggcgggcgctcctgcgcagcaccggcttcccagccgaaggcttggccctgctcgactccgacgacatcctccccctcctcgactcctttcttgccggggacatcgacagaactcacttcgagaaggaatacaccagtcgcgaggagtccggcgcaagggcgctcatcaacgtcttgaaggacgatgcagtatcgcgcgccatcgcatggcagaaccccaccgcgtggaggtccttcgaatccctgtcgtccacgagcggaatcaatgcttcgactcggcgcaaggtacgccaactcgccctctactggcaacgttactgttccaaggctgagaccattggatacttcggcccgttcgcctgggccgaagtcgacccggaggcctctgcggtcgaattcatctcctccgaccatctgatcgaccgttcccacgtcgcaatggaggcgtgggcggtcattgagatcgggaaagccctggcatcacgggccgaccttcagtggtggatgccaccaatcctgtcccccgccgtcgacctcaacatggagagaggcaccgtgacggtggctggacaccagccacgacgggtccgggaggacgaggcacgagttctcttcctgaccgacggcacccgtcccgccgcccagatcgccaagagcctcgacatggagcccgagcggttgcgcaggatcctcgtggcccatgaacgtcgtcacaccgtgatctgggacgccaacatccctgtctcagtgcacgcgtgggacatcctgcacgaacgcattgcccagatcggagacgctgggctgcgagatgaggccactgctgttctcacgaggttcgacgagcttctggaggtcatccgcaacattcccgacgcccggtccctgacggaggcgacggaatccctgtcccgtcttttcgaaaccgtgacaggaacctcttcgaacagacgtgcgggccaggcatatgcagcccgcagcctgtgctacctggactgcacccgcgccggaaccgccaaggttgggacccggcttctcgaagccctcgacgcccccctcaacctcgtcctacaatccgctgactggttcgcggcgaccttggcaaaggaatacaccaccgaaatcacggacctcgcaaatcgaaagcagcgggcctcccaccagccactgaccatggctgatgtctggccgtccacgatgtcgctgttctggggggactcaccgtccccactgcagcgagccgtgaccgaactgtcacggcggtggagcagagtcctcgaggggctgcagccagtcgacggtcgcatcgacacgacatcgtccgctctctcgggcgccgtggacgagcagttccccgtgtgcaccccgattccagaactgtcagtgcacagcccggacctccaggtcatcacctcgagcactagcaacatcgcctccggacgagtcactgcagtcatgggtgagctacatgcctgtctgagcagtctcgacatgccgttgctcgagtggtcgctgccccatggttccattcgcgatcgcatcaacaccgcgctcaacctgcgacgtctggttcccttgttccccgagacatggaggcgcaacaccggccgcatggttccagcgacggtcggagtgggggatcgcgcaatcgggttcactcggacggccgatcaagaccgtgcgaacacatggtcgatgtcggcactgctgttcgagcagaccgaggacggactcatgatccgtgatcccgatggcaggctctggaccatcgcacaagcgtggagcgtgcccatctccatggtcgccgccgatgcgttcaagatcgggctgcccggctcaccagcccctcggctcaccattgacaatctcgtcgtgttccgtcgtacctggaggtttcccgctggctccatcgacatcatgcacggttcagccgccgagaaacacgctcggctgagggagtggcaggtcacgaatcaccttcctgaccacctcttcgtcaagttcccctccgaacccaagccgatctacttctccttcgagtcccccgccatggccacggtcttcacgcgatcactgcagcgcgacgcccgagagaatccagacagtctcgtgacgatgtccgaagcactgcccgagcctcaatcctcatggctgcacgacacccggagccaccactacgtccacgaattccggctgcaactgaccaaggagcgacatgacgaccacagttgagacacatcccgaaacacgtggcacaaccgcgacatccatctccaatctgatcggtcacacccctctcgtaagaatggaccatctgttcgacggcctccccttcgaggtgtacggcaagctcgagaagctcaatcctggcggaagcatcaaggatcgagcagcacaatccatgatcgaacgggcaattcgacggggtgagatcgtcccgggccgtacgaccgtcatcgagtccagttcgggaaatctcggcatcgccgtggcgatactgtgccaggagcacggcctgaatttcatctgcgtaaccgatgccaaggccacgccaacgaacattcgactcatcgaagcgttcggggccactgttgaggtgatcgaagaacctcatcccgagagtggcgaattcctccccatgaggctcaagagggtaagagaactgctgtcagagattccagatgcatggtggccgaatcagtacgggaaccccgacaatccggcggctcacgagcggactgtccgcgagatcatcgaggcaatcccgcgggttgacacgattgtctgcgcgaccggctcgtgcggaacccttcgcggctgccacgaagcattgcgaaagctgtccccacgcacccgactcgtcgccgtggacgccaagggcagcgccatcttcgacgaggcaggagcaccccatccccgctgtgtcccgggacacggtgcgtcagtgcgaccgccgctgtggcgcgcggggctcgccgaccaactggttctggtctccgacgcggactgcgtcgtgggatgccaggaggccctgcgcaccgaggctcttctcctcggcggatcctcgggagcaattctgacggccattcaccgagtgtctcccacgattcccgctggttccaccgtggtgacgatcctccccgacggcggcgagcgctacatcgacaccatctacagccgctcgtgggtcgactcacacatccccgggctgccctctctcgccgactggggggctcccaaccccgccaattcgtatgacctgaacagaagtgcctcatgaagctctacaccagagagaccgtcgaaactgcgcttgtcgggcgtcatggccaggttctcagtgccgtacagagtgcatacatgctgcattcgacgggagagacatcgctgccattctcaaccttcctccgcccggccgggtatccgaacgatcggatcatcgcacttcccgcccacatcggaggcgacttcgacatagccggtatcaagtggatctcatccttcccggaaaacctcgaccggggccagcaacgagcttcctccgtactcatcctcaatagtctggagacgggatacccgaccgccctgctggagtccagtcagatttcagcaacgcgaacggcagcatcagccgccctggccagcgccaccctccatggctccgaagaccatgtcagcacgattggcatcatcggctgcggaacaatcaatcttgcaacgatcgactacctcttccacgtgcacccccagatcaacgaggtcctctccttcgatctgaggcgggagcgggcccatgagttctcgcacctcgtcaaggcttcgcacccagaggcccgggtccgtgtcgccaaggagcccgacgagattctggccgcaagcaacaccatcgcgatcgccacgaccgactcgagtcattggttggaccttccgccgtggcacgggccggggcaccaagtcgtcctgcacacgtcgctgcgagacctgtcagtgccctcgatcctggcagcggccaacgtcgttgacgatcctgatcacgtctgccgtgaagcgacgtccttggatctggcaactcagcagaccggcaaccgggacttcatcacggggagaatcggagacctccttcttggcgcgccgctgtcctcaagtcctgactcccgtgtcattttctcacccttcgggctcggcatcctcgacctcgcagtcgcctccgtcgtcattgctgccgcctcctcttcagcagtcgagatcaatgggttcgaccccgggaaacacgccacaagcatgattgaggtgaatcgatgaccaccacacagatcaacgacaacacggccgttctgcgcgacgtattccccgccggctccgtcgcattcgtgagcggtgcctcacgcggaattggcgctgcctgcgcgacagcccttgcggccgcgggatgcaacctcgccatcacttatcgaaggaaggagaacgaggcggcacaaatcgccgaatccattgaagccatcgggcgccagtgcatcacaatgcagatggacgtaaccgatgagaaccaagtgaccagagccttccgcatcattcgccagcattacggacgcctggacgccgcggtcttgaactcgggaatcaccagtgacgggcatcttgcaacaatgagccgctccaagtggagctcggtgatcgacacgaatctgaccggaaccttcctctgcacgcgcgaggcgaccaaggccatgtactcgtccggtggctcgatcgtcatggtcgcgtccaccagtggagttgcagggcgaccgggccaggccaactacgcagccagcaagggcggaatcgttgccatgatgaagacgctggccccggaggttgcggcaaagaacgtccgggtgaatgcggtggcacccggcttcattcagaccgacatggtggcggccgttccaaaagcggcactcgcccaggcaatccaacacatccccatgggccgtcttggcctggcacaggaggttgcgtcagccgttaccttcctggcctccccgctcgccgcctacatcacagggaagaccctcactatcgatggcggaatgatcaacggctgaccccaggacccgcacacccccagtaccgagaaagaaacaacaatgaccgagatcacccacactgccaacagcatccgaacccgcgccgaggaacgttccaacaaagcttggcgcctgaaggaggagatcatctccaagctcggtctcgagaccaagccagaatatgtctcggacaaccaaccgctcttcggacgtggccttgagatggattcccttgacactctcgaagtcgtcgtcgccgtcaacaatgagttcggagtctcggtcaacgacgacgacgtacaggcgttcggctcgatcaatgccatggtcgatttcatcgaggtgaacgagaagtgagttctcttgcgctcgaggcgccacccaaggacgcccgtaagaaattcgcctacgacagcgatgccatcaagacgatgctcccacatcgttggccgatgctcatgattgatcgcgcctacgacgtcgtcccagggaaatcgggcaaaggcatcaagtcggtcagcgtcaatgagccgttcttcgccggtcactaccctgaccattccatcatgcccggcgtcatgatcgtcgagtcgatggctcaactcgtggccgtcatctacgtagccgaggccattcagaacaatcccggcatgacgtcgcacgacgcacgttcaagcgttggttatctcggcgcgatccgtcagatgaagttccgacgcctcgtcactccgggcgaccaactcaccctccacgcccagctcggcgagaaagtgggggctctgcgcgaggtttccgtgagagcactcaatggccgggatgtcgtcgcccagggggaactcgtcgtcaccgagcggtgacacccagccacacacgagaaggaagtcccatgatcgttcgcccctacaggccacgtgatgcggaagcgatcgtacatctctacaacagccattccgactcccccaatccagtgtcgggagggattgttgaggaggagttccagagggagctcgaagaacgtggttcgacagtgttcctagtggccgaggaggccggatccattgtcggcacattcgggatgttccgcacgaatggccgacacaccatggccgatgatgaagtcttcgccgacatgttctatgtcaccccgtcacatcgactctcgacagttccgggacagctaatcactgaagccatcagcgagtgcttcatccagggcatcaacgtgatccgcctcaccgtgaaccccgcgaacatctccgcgctcaaggtttacagaaaagtcggttgtgcctgtctcggggccaccgatgcaggcgaggacgggaacattgagctgtacaacttcatccctctggttcttagggcaaccatcaccaaactcgaccacgattgtattcgagccctggcggacatgacttcgttcgcctgcatcaccgagggacgtccacttgatctgtcccacgacttcatcgtggacgctggacggaagatcgtctcccacagcatccagatcgggcgttcaaccatccacgccatggtcgacacgggctcgaggaccattgtggaggccaccctcgacaaccgcgactgggatgctcctcgccagatcgtcgcccccaccccctgtcagaaccggcccgaggaacagcgaggcaaccctgtccggctggtgcacaagaagcttgaggtcaccttcaacgaaggagtcattgagatcagtacgactggccactggggcccggtcctcgcaatgtcctggccctcctccgtctcgcaccgcgctcacgggtggcgacagggccccgccaagtcgtatcgatgcgagcttctcgagaattgcctcgtcctggatgacgaaggaggagtgaaatgcaccatcagcctcaatgattgccaagtcgcgatccggatggatggtgccccaaaaacggaattgagaatgtaccagtggtgcagcctgcgccagggctatctgacggctgacaccggcatcacgagcttcaaccgggcatccagtgggctcggagtcgccgtccgggactcgtccgagattgtcgccgcgggccttcccgtcatccctgacacaccgatcacatggagtgagggtgacatcacggttcagctcgatccctgcggccgcgcctccctgatccactcgaccctggtggaccgaagaatccacttggacgagtctggctcggcaagtctcaccatgaccgtgtttggtgattcccagccccatcgtgccgacaccgtcgagctgcctcccctcgcggcaggcaccgacaggatcgtcctcaagccggctgccggaggcgtgaccacatggcgcttgggcgccaccaaggtgctcaagtcaccgtggccacacgcccgcgcgctcgggcccaatccgatctggcgagccggcctgtgggtcagtcacgagccggatcgccacgaccgtcgccaaggaatggggtggggtcccgatcatcgcagttggaccctgtcggaagacaccatgaccagtactgacgggacactctcctggcgcttcagcggctcccccgacaccggctggacggtcgacgtcacgacgagcaacacgcacggggagaccgtcgtctggctcaccccggactgcccggcgggcgagaggatccgcacgtctgatcatgccgtgacgaccatgcttgacatctcgaagccatggcagcgctggaccacccgatgcgcaattcctctcagacacgggaagtggttcctcatcgagcctgatcatgacctcactgattcccccgaaatcctcatgcgctctgttcacggggtcctgctcgtcggctgtgtcggacgagcccactccggatccgcttcctggcgctttgccatcacgtcagaactccccacctccaacccaagaagaaacgactacacctcagccgcctgaacccaaccagttggaacacccactacagaagaaatggagcaccaccatgtccatcactgagcagtacaagacccttcgcacctcggtcggcctccacacgcctaccggtcccctggtccgtatcaccggtgatgatcgtctcgagtttctcgacaccttcctgtcccgcgcctcggacttcgtggaccccgacaccactcgggagtgcctcgctctcaccgaggacggccttccgctgacgatcttcctccacatcgagcgcgaggaggagtcatggctccttccccgcaccgccatcgatgcggcgaccctcgccacgtacctcggcaacctcgagaccgatggtgacctgtcaatcgagattgctccagagggttggggagctgtcgctgtcgaggggccgctgtcgtggcagatcgccgaaaaccttctcgacttcgacgtggctggcctcgttcttcacgccgtcacggacgtcgtcgttcccggggcccccgagggatcgaaggcatggctcgcccgggtcggaaccactggagagtacggctacctgctcgtctccaacgttcccgacctcgcccgcacttatctcctcagccgcgccacggagctgggcggtcaggcagtcgacgccgatgctctcgcacgagtccaggccgaggccgggatgccctattacgcgatgggcgtgtgccacctcgatgtcgccgggggtgacctcgcctggctcgtggactggcagcgcatcggcgagttccaaggatccgagaatctgcccacacccgtccgagaccagcgccgactggccgccatcgccctgcccaccggcaaccgcccggaagctggtcagaccgtcgctgccggggatgaggagattggaatggtggtgtacgtcaccccgtccgccaatcccgatgaggaactcgcgttcgcacttctggatgctcctttctggactcccacccttccgttgaccgtcggtgcccacgacgggaccacggtcaccctgccccgcgtcgtggcagcctccagcctcaacaagatggggtgacagcgatgacgatcactgctgagaacgccaccacccgcagcgacattgcccggagcattgcggtgaccggcgtgggactggtcacggcacagggtgaccataccgacgagtgctggaccgaacttgtcgatggggtttgcggaatcaccatgaacgtcacgttcgatgactctggcaccacgattccgtgtgctggcgtggctcccattccgaactctgattcgatcgaccgctgttacctgctcggcgtccatgccatgcgtgaagctctcgagatgagtggcatcgacctggactccgtgggtcgtgatcgcatcggactcgtggtgggctcaagcctcggcgcgatgcccaccttggaggcggctcatcgccgggccattgagaccggcgtgctcgatgccggattggcggcagactcccagctccactgcgtcgccgaccacctcgccgctgagttcgacatccgtggaccccgcgtcgtgacatcgaatgcgtgtgccgctggtgccgtggcgatcggctacgccgcagaactcctctggtccgacgatgtggacctggtcgtctgtggcggtgtcgatccactggcccagatctctgccaatgggttcacgtgcctgggagctctcgacaatctcccatgcagcccgatggccggttcctccggtctgactctgggcgagggagccgggttcatggtcctcgagagaacagatgcggcggctgccagaggccaggaggtgatggccgaaatcgccggctacggcacaagttgtgatggttaccaccagactgccccggacccgggtggcaatggcgcccgcagctcaatggaggccgccctgcgctcagctcatctcaagccgtccgacgtcagctacgtcaatctccacggcaccggtactccgaccaacgacgccgtcgagccgaaggcactccggtcattgttcaagtccgatgaccttccccctgtcagttcggtgaagggcgccatcggtcacactctcggcgctgctggcgccatcgaggccgtgtgctcgatcaaggccatccacgagggggtcctgccgccaaccgtcaacaaccgcgggcaggcttcccgaactggtctcgacatcgtgccggagtgcgcacgcaaggccgctcccgacgtggtcatctccaactccttcgccttcgggggcaacaacgcatcagtggtcatcaccgcacctcgaggaggcgttcactgtaccgccccggcgcagcttcgcgaggtcggaatctcaggaatggcagctctggcgggaaaggccgccaactcggaggagcttctttcggccctgtcagaagattgtccaatctggatggccgatgagaagacctgggaaggggatgctgtccaaaccggccatgtggacatcaagcgcctgtcccgcacaatcaacccgtccaaggttcgtcggatggaccccttgggaatcatctccagcgcggtggtgactgatctgtatgcccgacacgggaagctgagccgcaaggatgccgaaagcacgggaatcatcttcgcaaccggctacggtcctgtgacggcggtgacgcagttcaatgacgggatcatccgccacggttccgagggtgccaacgccctggtgttcccgaacaccgtggtcaacgcagccgcaggccacctcgcgatgctgaatcgctaccgtggttacacggccaccttggcatgcggtggaaccagttcactcatggcgctgcttctcgctgctcgcgtcgttggccgcggcgctgcggatcgcatcatggtcgttatcgctgacgagtttcccagcattgccgtccaggccgtcgcgaagcttcctggctaccgacacagggttgatggttccggagccgtgctctcggaaggcgcggtatgcgtcctggtggaggccgtcgaagtcgccgaagcacgcggtaccgcccccatggcgctgctacgcggcttcggatcccgtggagagtccgtgggagtcggtcacaccgcatccgatggacgggcttgggccaaggccatggccgctgcactgggcccggccggcctgactgcctccgacgtgtcgaccgtcgtggcggcatcaagcggacatcctcgcgtcgaccgagccgagcaggcggccaggcggatcgtcggactgtccgcaaccgctacgaccttcccaaaggcgattgtcggagaaacacacggatcggctgccgggatcgggctgttcggtgccctgtgcggttcgaggtcagccgcgcaccagaacatccttgtcaacgccttttcccacggcggtggttatgcctcgatggtggtggagtcactgtgaccacgacgcttctgccacgggttgcccagccgggaccgggcgtcagccatgtcgacaccgaccgtcccatcgagtgcatcatcacccaccacccccacatgccgcgtgatcgcggaggccacgccacctccgtgtcaggcaggtacttgctgcgccaagccgcagaactcatgctcggcacggatcctgcgcattgccccgtcgtcgacccttcgcggcgctggtactggcccggaatcaatcttcacggttctgtctcccatgtcccgggctggagcctgacgacgctgagcaccggcggccacatcggggcagacatccaggacttccgggagcgtcccggcgcaatggcattcatcggtgacctggtcaagctgtcgcgatcggcgtcactccgagaattcgcggagtgcgaggccgtcgtcaaggtgtccgaattgactaaggagacgttcgggcacgtgcgactgcccgaatggacacccggatggcgccacgttttcgaggactactgggtctggagtctcgagatgcacgggatgggagtcatcgcactcgcatccgatctcccccgagccattcgctggtggcggtgcgacgccgatgcccgtggccgtctccaggctctccgacccataagcagtcttggaccaggaaggccgtcatgagccggtactcacgtcgaatctcaggcatcgaacgcggctatctcaacgccgcaacccggggcccgcaccccaccatccacacgatgatcgacttcgagggccgcgtccccgccgactgttggcggcacgcatccacgattgcgtcggccgccaaccctggcatgacagtggtccggaggtcgggccgatggacatccgatccagcgggctgtccggttgtgttccacgactggaccgcggaccccaacgacgttgccgacttccacgctgacatggatctcgtgacgggaccatcgtccacgctccacgttttcgagggggcggaacgcacccgaatcaccttggcagcaagccatgccgtgaccgatgggcggggcatcgaacgatttctcgtcgacctgcttgcagcgttggacgagcgtgaacccattggaagccccgacaccctgaccgatgtcgatatcaaacgatccttggagaacagcatcaagccccgacgccacctggccgctgtgcccgccgatgtcctttctccactgggggggaggaagaaccaacgtatatgggcctccaggacgtggcacagtgccccgggagccatgagcggaagaatcgctgccgctgtggccgagatgatcgaccacgccgcaatgatcatcatcccggttgacatccggcggcacgtcccagaggtccgatccacagcaaacctaagtgcccaactgccagtgatcatcaccccgaaccagcgctggcaaagcatccatgggcatctgctcacggaccttgctcgccatcgagaccttgcgatcatcagtgaggatttccgccacaacaatccgttcgcatcgaccttggaggaaagccaggccatcggcctcgatggtgtctatccctgtgccgcaatcatctccgaccacgggaagctcgacctttcaaggttccagaccttggaactcaccccggtctcgatgcgaagcctcccgatgctcgttccctactccgcaatgttcatcagcagttgcaccgtcggcgagaccaccactgtcaccatcgctcatcgcgctgatgacgatcccgattccataaacaccttcttccaccacatcgaatcccagatgtccatctgagccacgtcgtccctggagagcaaacatgaccacccaaaatgtcatcaccccgccgcgccccgtcacctcccatgccacggcgaccaggtccgaggctccaccgcgaagcgtcatcagagccatggccatctcgatggtcgcgaccctcatggtcatgctcgacacgaccgtcgtgaacgtgtccttgagcgcgaccaccgcccgcttcgggagcatgggcagcgtgcagtgggtcctcacaagttacctacttgcactgtgcgcgacgatgacggcctccgcctgggtcatcgaccgccttggtccacggctcaccttcatcgcctcaatgaccatgttcctcatcggctcggtgatgtgtgcactgagcgattcagtgtggcaactcgtcactggcaggaccatctccggtgccggagctgggatccttgttccgacagcatccgtcctgcttatccgtggcatcccacgcgaacaacttggcagggtgcaggcactgaatgggagtgtccagttgatcgctcccctgatcggcccgactgtgggcggtctcctcgttgacaggtgcgggggctggccggccatctactgggcgaacgtccccgtagctcttgttcttctgattgaggccgtccgcgtcgatccggacgaaccacacaccgctaagcgccgcctcgatgctctcggcctggtctgtggcagcaccgcgatcgtgctgacagtgcttggtgtctcactcttcggcaggacgtcgcgaaacaccaccttcctgcttacgatcggcgcgcttgcagtcctcgcatgggcgttcttcatcacccacatccgaagggctaccaaccctctgcttgacgtttccctgtatcagaaccctgtctattcatggtccagcttcaacgtagcggtgcttggtttcggtctctacgcccccatggtcgtcatgcccctctatctcgaggcgacgcgccacctcactgccgtccacactggtctggtgatgtcagtggccggcgtcggcgtcattatggccggaatcctgtgcacgaagatcatgggccggatcggtggaggcctcacgatgacagttggcataactctgagcatcatcgccactctgcccctggtccggctgacgaaccacacctcctacatactcctggcagtctgcttggccttgcgtggagcaggaatcagcctgacaatcgtcccagccatgacacgggccttcgagtccatcaagaggacggccatggcggacgcctctgcacagctcaacctgttgcagcgaatcggcgggacaattgcgacagcagtcatcatcgcagttatccaccacgaggccatgctcacccgcggactctcccccacagtgttctcgcacgccaacgtgtggatcctcaccgcgaccgccgtcacccttctgccggccttcgcgcttgcgaaggccgaaagacaacagcaggatctctgagcaccgaggagtactccctcgtagaccctcctctgatctaattgggttcgttccaagtgtgtatctcactccggggagccccgattgctgaaccacatcccgttcaccctggcgagtccctcgtggtacgacgtcccctgggcgcccggatctccgtatctcacaggagatatctcggtcctgccagcggactcgccaaggtggacgacgaccatccggggtccttggcaaatccacatgccacctcgtccgacccttccagaggtggggtggaaagtgcatgtgtctgccaagccatcggaattggaatcggttgcctcagtcgtagcactgtggtgcgtacgccacagcgtccccttcaaagtacttcgcacccgaggtctcgttcacgcgagtcaagtcaagtatgcggaccgaagtcagagcggcaaggtctgcacctgctaccccgacggcgagagccttgagcacttctgctccggtcttgccgagctgcttcagaacgtcgattcacctccggtgtccggcgagctgcgagtcggatcctcccctctgtggttgcgtcacgggagtttccgagaggcatgggcggtgtcatccacaggagtaccgttcccggtctacccgggaacaacacatcctgatcgtcgaggccccgcgcccgcagaatccgatcacgacacgccgtggatccggaggctccgtcggacgaatcgccccagcacggttcttcccatcgacgatgtcagactcctccaccgatcaaatgctggcggcgtgtatcaggcaacatggagagacggcacatcggtagtcgtcaaggaggcccggcacctgtccggacttgatgcggcgggtgtcgacgcccgagtgcggctgcgtcacgagtacgaggccctgagaagactggacccctatcgggccgctccccatcccattgatctcattgagaccgaggacggctcgttcctgatcatggaattccttgacggaatgacagtccaccaggagatgtcgaggttccatcctctgattagtaggcgacctcatcggctatcgatgaccgatttttcacgctggtgccgagaggtcgaagatcgcttgaggaatgtcacgagggtcatggccgggtgcggaatcgttcacggggatcttcatcccgcgaatctgatacatgtcggccatgaggttttggttactgactttgaatcctgctcaatcgacggggtcgccgtctcgtcagggatcgccgctccctggttccagtcggacgacacgattcccgatccggcgacgactgacgatctccacactcttctcgtggatccgacttgcggccccgcgcttgtcccccatccaaatcttcgcgcgctcatcagccaggccgcagtcgaggacatgatgggaaatccgactggtttaccacatgcctggaacctcgaggacatgacaagcgaactcgccaaggggatccgggcatcagccactcccgcacgagccgaccgcctctttccctcagacccctacctgttcgggcatccaggttcagaattcggcctgatgcatggcgccgccggaatcatggctgctcttgccgtgactgggtacggtgttgacgcgaatcacgtgacctggatgaaggaccgcttggccacccgcccgaccctgctgccggggttggccaacggaatcgagggaattgccctgggtctctccctgtgcggtcagaacgacatggctgcatccctgctccaccagtccggaattctcacgatcacaacgaacggatcgactgacctcaccctcggtactggtatggcgggccgagcgtgcgcgctgcagtccctctcacaacgactgtcatcgaaatctctcgcccacgctgcatataccctctgggaacaactcgccgtggctgtgcggaacactgatgtggccttgccgaacggcctgttctccggttgggagggaatcgggctctccctgcttgcctctcccctgccggatcgtcatgatctcgcccgccactcactccgactggccctggccacgacaacgattgttgacggtgcgctcttctcaggcgagggacagatccgatggccatatctggggcgtggtcccgcggcatgtggcccgctcgccgccaggcttgatgatgaccagacggccaaggccgtggcacagacctgtcgttgtcccctgactgagtcatccggtctccacaatggccgcgcaggtctcctactcgtcctccgccagctcgtgggagaccaagacgacgccgttcgccgccacctcatgagactgtcgtggtcgatggaccgtcgcgaggaaggcacattgctgctgggtgatcatggcctgcgtttctcatccgatctcgcgacggggtcagccggcgccctcctcgccctgagcagggacccatggcggaacatgacacgaatgctcggaatatgcgatgacacctgtcatggcccactagtgacagtttgatctagcgccgatagttcacaactgaaagactccaaacatcgaggaaaacatgctgagccaaaacgccttggcaggcgtggctcgtttcaccacgatgaacaccaggagacagaatgtccgttgaggccatgcaatccatcgagatggacgaggaaaacagcgccagccagacagtttgcgcttgttacagcttcttctcgtggtcaggatgctgcgtagtctcccaagcggtggaagcatcttgatcgtgtgagacgccgtcgactaccctgtcccccgtggtacgcacacgccccgtcctggacagtcccggaagaccgctcatcgcctccggagtcgtcctggcggtcctgctcatcatcgcggtgatgacgatggtgcttcagcgcgaccccactctcacccccggacgccgcattctcggtatcgtcctgtccacggtccaggccgtcggattcatgtggctgcagacccgcatggttcgtcacggcaagggttcgcgcaacatgcgtgcgacccttggaagggtcggtttctgggccacgtggggactcgtcgcagtgggagtcgtcaatctgtggctgaccaactcgtggaccctcttcggggcctccgtcgccacgcccctccttctcctgccaggggtgtggagtgtggtggccaccctcgtgaccctgatcgtcggtttctccgacctcgtggtcacccacacctcgccactgacctcagccacggtcgtgctggtgaccatcgcggtgtcggtgaacctctacgcattcacgaagctgtcgacggcactcgttgaactccgctcctcccaggaggagatcgcccggctgcgcgtggacgccgagcgtcaccggatatcgcgggacctccacgacatcatcggtcgcaccctggtcgccacgtcgatgcgccagcaggcggccctccacctcgtcgaccgcgacccgcaacgggccaaggaacagctcgacgccgcccatgacgcaatcaccgaggggcagcaccagttgcgttccatcatccaggccgagatgagcaccagcctccccgacgagatcagcgacgccacattcctgtgcgaccgactccacatcgacttccgcatggatgaccgcggcagaccgcacaaacccttcgactcggcggcggcggcggccctgcgcgagggaatcacgaacatgctcaagcacagcgcggcgggctactgccacgtcgccatctccccggacctcctgaccgtcaccaacgacggttgtccgcaatcacctcgcccctccaccacaccgggcaccggaatcgaccatctccggtcccagatcgaggcgctcggtgggtcggtgacgacgtcgcggccctcgcggggcaccttccggctccgctgctccttcccgacccggggggcgtccacgaccacacccgcgaccgaaggaggacgatgacgacgagaatcctcctcgccgaggacatcaaactggtggcagaggccttcgaggcactgctctcggtggaaccggagttcgaggtcgtcgcacgggtggcacgcggcgacgacctggtcacatccgccacccgcctgttccccgacgtgatcctggccgacatcgacatgcccgggatgaccggcatcgaggccacccgaatgcttcgcgacaagggataccgcggcagaatcatcctgctcaccgccctgccgggaagcgggcacctgcacgccgcgatggctgccggagccgacgggtacctgctcaagtcgatcaccgcgccctccctcatcaacgccatccgggcggtgtgcaacggccagtcggccatcgacccgaacgtcgccgcggtcgccatgcgcaagggaccctcgcccctcaacgaccgggaaaccgagattctgcgcctagtcgccgacggttcctccaccgcgcagatcgcctcgcggctgtacctcagcaagggcaccgtcaggaactacctgtcgacggcgatgtcgaagctcgacgccgactcacgcacagcggcggtcacgcgggcacgcgaggagggctggctgtagcaggcgacccgctcagcccaccgcccctcagcccgccgactcctgacgcacggcctcctcgaccgcccggctgagcagggacccggccctgaccatcgacgtctccgggtccggctcgagatcggacaacgcgatgatccggtcgaacgcggaccgtttctcctcgggcaggtcacagcgtccgcacaccgcccagacgggcaccccggcgtcccgggcgatcttgcggatggtgtcgggaagcttgccgagcagggtctgctggtccagccgcccctcccccgtgacgacgagactggaggcggagatccgcgacaccgcgcgggaccatcccaggacgaccgccgcgcccgggcggtacctggtccccaggcacatcagcgcccagccgacccggctgggcggctgcgaaccccctggccaccgcccggcaggcctttcccgaactcagcgaccccttgaaggagtcgacggcaacgatgaccggcgcattcggatcaggacgcatgggatcagcatgtcacgtcgatacggagcagtcgcgccgcctacccctagactcgggggcatggtcaaccgagtctacctgtccctgagcgttctcgccctcgtgctgtgggtggtcgcctaccgtcacatgccgggctgggccgcgggcatcaccctggtgggcatcgtcgtgctgtcgctgtggtgcgagtggtcgcgggtgcgcaccctggccaggatcggcaagtcccgccagcagggcccccgctcctcccgaggacgcaacctgtcgtgagcaatacgattcccgcagccctccaccccggccctgacgaggcc

SEQ ID NO: 33 - DNA, 29140 bp, unidentified
  source 1..29140: mol_type = unassigned DNA; note = Bacteriophage of P. acnes
agtgaaatacctcccttttgtggatttgtctgtttgtcgactttttgtgttggtggtgagtgttgtgcagcctgagcttcctgatagtcgcgattggtgtggggagacgcgtcgttggtggcgtgtgtggggtgaggatagtcgcgcgcagtacgtgtctgatgaggagtggctgtttctcatggatgctgcggtgattcatgattgtgtgtggcgtgagggccgggcggatttggtggcttcgttgcgtgcccatgtgaaggcttttatgggcatgttggatcgttattcggttgatgtggcgtctggttgtcgtggtggcggttctgcggtggcgatgattgaccggtataggaagcgcaagggggcttgagtaggtgtctggtgttgtgggttctcaggttcctcgtcaccgtgttgctgcggcgtattcggtgtctgctggtggtgatgctggggagttgggtcgtgcgtatgggttgacgcctgatccgtggcagcagcaggtgttggatgattggctggctgtcggtagcaatggcaggcttgcttctggtgtgtgtggggtgtttgttccgcggcagaatggcaaaaacgctattcttgaggttgtggagttgtttaaggcgactattcagggtcgccgtattttgcatacggctcacgagttgaagtcggctcgtaaggcgtttatgcggttgaggtcgttttttgagaatgagcggcagtttcctgacttgtatcgtatggtgaagtcgattcgggcgacgaatggtcaggaggctattgtgttgcatcatccggattgtgccacgtttgagaagaagtgtggttgtccgggttggggttcggttgagtttgtggcccgttctcgtggttctgctcgcgggtttacggttgatgatttggtgtgtgatgaggctcaggagttgtcggatgagcagttggaggctttgcttcctacggtgagcgctgccccgtctggtgatccgcagcagattttccttggcacgccgcctgggccgctagcggacggtagtgtggtgttgcgtcttcgcgggcaggctttgtcgggtggtaaaaggtttgcgtggacggagttttcgattcctgacgagtctgatccggatgatgtgtcgcggcagtggcggaagttggcgggtgacactaatccggcgttggggcgtcgcctgaattttgggaccgtaagcgatgagcatgagtcgatgtctgctgcgggttttgctcgggagcgtcttggctggtgggatcgtggccagtctgctacgtctgtgattcctgcggataagtgggctcagtctgcggtggatgaggcgagtctggttggcgggaaagtgtttggtgtctcgttttctcgttctggggatcgggttgctttggcgggtgccggccggactgatgctggtgtgcatgttgaggttattgatgggctgtcggggacgattgttgatggtgtgggccggttggctgactggttggcagttcgttggggtgatactgaccggattatggttgccgggtctggtgcggtgttgttgcagaaggcgttgacggatcgtggtgttccgggtcgtggcgtggtggttgctgatactggcacctatgtggaggcttgtcaggcgtttcttgagggtgttcgttcgggtgttgtgtctcatcctcgtgctgattctcgccgtgacatgttggatattgctgtgaggtcggctgtgcagaagcgtaagggttcggcttggggctggggctctacgtttaaggatggttctgaggttcctttggaggctgtgtcgctggcgtatcttggtgcgaaaacagttaaagtgaagcggcgtgaacggtctggtaggaagcgggtgtctgtggtatgaacgtggacgagttggctctgattgagggcatgtacgatcgtatccaaaggttgtcttcgtggcattgccgtattgagggctactatgagggctcgagccgggtgcatgatttgggggtggctattcctccggagttgcagcgtgtgcagactgtggtgtcgtggcctggtatagctgtggatgctttggaggagcgtctggattggcttggctggactaatggtgacggctacggtctggatggtgtgtatgctgcgaatcgtctatcaactgcgtcatgcgacgtccaccttgatgcactaatttttgggttgtcgtttgttgcgatcattcctcatggtgatggtacggtgtcggttcgtccgcagtcaccaaagaattgtacgggcaagttttcggctgacgggtctcgtttggatgcgggtttggtggttcagcagacgtgtgatcctgaggtggttgaggctgagcttttgcttcctgatgtgattgttcaggtggagcggcggggttcgcgtgaatgggttgaggtggatcgtataccgaatgtgttgggtgctgttccgcttgtgcctattgtgaatcgtcgccgtacttctaggattgatggccgttcggagattacgaggtctattagggcttacacggatgaggctgtgcgcacactgttggggcagtctgtgaatcgtgatttttatgcgtatcctcagcgttgggtgactggcgtgagtgcggatgagttttcgcagcctggctgggtcctgtcgatggcttctgtgtgggctgtggataaggatgatgatggtgacactccgaatgtggggtcgtttcctgtcaatagtcctacaccgtattcggatcagatgcggctgttggcgcagttgactgcgggtgaggcggctgttccggaacgctatttcgggtttatcacgtctaacccacctagtggggaggctttggctgccgaggaatctcggcttgtgaagcgtgctgagcggcgtcaaacgtcgtttggtcagggctggctgtcggttggtttcctggctgccaaggcgttggattctcgtgttgatgaggccgatttttttggtgatgttggtttgcgttggcgtgatgcttcgacgcctacccgggcggctacggctgatgctgtgacgaagcttgttggtgccggtattttgcctgctgattctcgtacggtgttggagatgttggggcttgatgatgtgcaggttgaggctgtgatgcggcatcgtgctgagtcgtcggatccgttggctgcgcttgctggggctatatcgcggcagacgaacgaggtttgataggcgatggcttcgggtgttgcgtcgaggttggctgctaccgggtatcagcgtgaggcggtcaggtttgctggaaagtatgcgggctattatgccgagttgggtcgtttgtggcgtgtcggcaggatgagtgacacgcagtatgttcgtttgtgtgtggagttggagcgtgccggccatgatggttcggcatcgatggctgccaggtttgtgtcggattttcgccggttgaatggtgtcgatcctggtttgatcgtgtatgacgagtttgatgctgctgcggctttggctaggtcgttttcgactatgaagattatgaatagtgacccggatagggcgaatgacacgattgatgcgatggcggcgggtgttaatcgggctgttatgaatgctggtcgtgacacggttgagtggtcggcgggtgcgcagggtaggtcgtggcgtcgggttactgatggtgatccgtgtgctttttgtgccatgttggctacgaggtcggattatacgaccaaagaaagggcactcacttccggtcatacgcggcgtcataagcgtggtggtaagcgtccgtttggttcgaaatatcatgatcattgcggctgtacggtggttgaggttgttggcccttgggaaccaaatagggctgatgccgagtatcagaggacgtatgagaaggcccgtgagtgggttgatgatcatgggttgcagcagtcgcctggcaatattttgaaggctatgcgtactgttggcggcatgagataatttgctgtggtttccggttgtgcgccgccggttattggtgcacagggttgtctcccgcacgggggtcaacaatgttgtgttgttttccgcaaggagtgtagggttaggctatggccgatcagagtgttgaggaacagaatgttgacaatgatgttgtggagtccggaaaggataacggcattgttgatacagtaaaagatgatggcgggcaggaggtagccgacaatcagttgaagaatgaaggcgagggtaaatcgccggggactgattggaaggcggaggcccgtaagtgggagtctcgtgctaaaagtaatttcgccgagttggagaagcttcgtacatcgagtgacgattctggatctactattgatgagcttcgccgcaagaatgaggaactcgaagacaggatcaacgggtttgttcttgagggtgtgaagcgcgaggtggcttcagagtatggtttgtccagtgatgcgatcgctttcttgtcgggtggcgataaggagtcacttgccgagtctgcgaaagctttgaagggtttgatctaccatagtagtggtggcgcgggtgtgcgccgtcttgcggggagtgcccccgttgatgatgttaaacgacgtgagggtgtcgcgtttgtggatgctcttgtcaataattctaggagatgatttgtgatggctgacgattttctttctgcagggaagcttgagcttcctggttctatgattggtgcggttcgtgaccgtgctatcgattctggtgttttggcgaagctttcgccggagcagccgactatttttggccctgttaagggtgccgtgtttagtggtgttcctcgcgctaagattgttggtgagggcgaggttaagccttccgcttctgttgatgtttcggcgtttactgcccagccgatcaaggttgtgactcagcagcgtgtctcggacgagtttatgtgggctgatgctgattaccgtctgggtgttttgcaggatctgatttccccggctcttggtgcttcgattggtcgcgccgtggatctgattgccttccacggtattgatccggctacgggtacgcctgctgcggctgtcaagtcttcgctggataagacgaagcatattgttgatgccacggattctgctacgaccgatctggtcaaggctgtcggtcttatcgctggtgctggtttgcaggttcctaacggggttgctttggatccggcgttctcgtttgccctgtctactgaggtgtatccgaaggggtctccgcttgccggccagcctatgtatcctgccgccgggtttgccggtttggataattggcgtggcttgaatgttggttcttcttcgactgtttctggcgccccggagatgtcgcctgcctctggtgttaaggctattgttggtgatttctcgcgtgttcattggggtttccagcgtaacttcccgatcgagcttatcgagtatggtgacccggatcagactgggcgtgacctgaagggccataatgaggttatggttcgtgccgaggctgtgctgtatgtggctatcgagtcgcttgattcgtttgctgttgtgaaggagaaggatgccccgaagcctaatccgccggccgagaactgatttattgttgcggtgatgtgtcaatgtgcagggggtggtgttgatgggtatcattttgaagcctgaggatattgagcctttcgccgatattcctagagagaagcttgaggcgatgattgccgatgtggaggctgtggctgtcagtgtcgccccctgtatcgctaaaccggatttcaaatatagggatgccgctaaggctattctgcgtagggctttgttgcgctggaatgatactggcgtgtcgggtcaggtgcagtatgagtcggcgggcccgtttgctcagactacacggtctaatactcccacgaatttgttgtggccttctgagattgctgcgttgaagaagttgtgtgagggtgatggtggggctggtaaagcgttcactattacaccgaccatgaggagtagtgtgaatcattctgaggtgtgttccacggtgtggggtgagggttgctcgtgcgggtcgaatattaacggctacgctggccctttgtgggagatatgatatgaccagttttccttatggtgaaacggttgtgatgcttcaaccgactgttcgtgtcgatgatcttggtgacaaggttgaggattgggggcatcctgtagaaaccgtgtaccataacgtggccatctatgcttccgtttcgcaggaggatgaggccgcggggcgtgactctgactatgagcattggtcgatgcttttcaagcagtctgttgttggtgctgattatcgttgcaggtggcgtattcggggtgttgtgtgggaggctgacgggtctcctatggtgtggcatcatccgatgtctggctgggatgcgggcacgcagatcaatgtgaagcgtaagaagggctgatagattgtggctcaggatgtgaatgtgaagctgaacttgccgggtattcgtgaggtgttgaagtcttctggggtgcagggcatgttggctgagcgtggcgagcgtgtcaagcgtgcagcctcggctaatgtgggcgggaacgcttacgatagggcccaataccgtaacggtttgtcgtcggaggtgcaggttcatcgtgttgaggctgtcgctcgtataggcaccacatataagggtgggaagcgtattgaggcgaagtatggcacgctggctaggtcgattggggcagcgtcgtgatcgtctacgatgaccccaggaagtgggctaaacgtgtgttggcggatgatggctggctgtctgggataccatgcacagggacagtgccggatagctttgagggtgacctgatttggttggcgttggatggtggcccgcagttgcatgtgcgtgagcaggtgtttttgcgggtgaacgtgttttcggatacgccggatcgtgctatgtcgttggcgcgtcgtgttgaggctgtgctggttgatggtgtggacggtgatccggtggtgttttgtaggcgttctacgggtcctgatttgctggttgatggtgcacgttttgatgtgtattcgctttttgagctgatatgtaggcctgtcgaatccgagtaagcgtatcgttgtttttgttgattgatttttagtttgattgttttttgggggttatgatggctgcaacacgtaaagcgtctaatgttcgctctgctgttacgggtgacgtctatattggtaaagctcatgccggtgacactattgatggtgtgaagacggttcctgacggtcttaccgctttagggtacctgtcggatgacgggtttaagattaagcctgagcgtaaaacggatgatttgaaggcttggcagaatgcggatgttgttcgcactgtggctacggagtcttctatcgagatttctttccagctgatcgagtccaagaaggaggttatcgagctgttttggcagtcgaaggttactgccggagccgattcgggctcgttcgatatttctcctggtgccaccactggcgtgcacgccctgttgatggatattattgatggcgatcaggttattcgctactatttccctgaggttgagttgatcgatcgtgacgagatcaagggcaagaatggcgaggtgtacgggtatggtgtgacgttgaaggcgtatcctgcccagattaataagaagggtgatgcggtgtcgggtcgggggtggatgacggctttaaaagctgatactcctccttctccgaagcctcagccggatccgaatccgccatctgagaactgatacacgattttaggggattgttgatagatgagtgacacaggttacacgttaaagattggtgactgtagctgggtgttggcggatgcggaggagacggctcaggctgttcctgcccgtgtttttcgccgtgcagctaagattgcccagtcgggggagtctgcggattttgcccaggttgaggtgatgttttctatgttggaggctgccgccccggctgatgctgtggaggctttggaggggcttcctatggttcgtgtggccgagattttccgtgagtggatggagtggaagcctgaaggtaagggtgcctctttgggggaatagtttggctccacggcctgattgatgattatcgtggggccatcgaatatgattggaggacccggttcggttgctcggtttatgatgttggtggcccgcagatgtgttggggtgaggctgtccggctggctggcgtgttgtgtaccgatacgtctagccagttggcggcccaccttaatggttggcagcgcccgtttgagtggtgcgagtgggctgtgctggacatgctggatcattacaggtctgctaatagtgaggggcagccggagcctgtggcgaggcctacggatgagcgtagggcccggtttacgtctggacaggtggacgatattttggcgcgggttcgtgccggtggcggggtgtctcgcgagattaatattatggggtgaatagtgtatgtctggtgagattgcttccgcatatgtgtcgttgtatacgaagatgcctggcttgaaatcggatgttggtaaacagctttctggggtgatgcctgctgagggtcagcgttcgggtagcttgtttgctaagggcatgaagttggctcttggtggtgccgcaatgatgggcgctattagtgttgctaagaagggcctcaagtctatatatgatgtgactattggtggcggtatagctcgcgctatggctattgatgaggctcaggctaaactgactggtttgggtcacacgtcgtctgacacgtcttcgattatgaattcggctattgaggctgtgactggtacgtcgtatgcgttgggtgatgcagcttcgactgcggcggcgttgtctgcttctggtgtgaagtctggcgggcagatgacggatgtgttgaagactgtcgccgatgtgtcttatatttcgggtaagtcgtttcaggatacgggcgctatttttacgtctgtgatggctcgcggtaagttgcagggcgatgacatgttgcagcttacgatggcgggtgttcctgtactgtctttgcttgccaggcagacgggtaaaacctcggctgaggtgtcgcagatggtgtcgaaggggcaaattgattttgccacgtttgcggctgcgatgaagcttggcatgggtggtgctgcgcaggcgtctgggaagacgtttgagggcgctatgaagaatgttaagggtgccctgggttatcttggtgctacggctatggcgccgtttcttaacgggttgcggcagatttttgttgcgttgaatccggttatcaagtctatcacggattctgtgaagccgatgtttgctgccgtcgatgctggtattcagcggatgatgccgtctattttggcgtggattaaccgtatgccgggcatgatcacgagaatgaatgcacagatgcgcgccaaggtggagcagttgaagggcatttttgcgagaatgcatttgcctgttcctaaggtgaatttgggtgccatgtttgctggcggcaccgcagtgtttggtattgttgctgccggtgtggggaagcttgttgcagggtttgccccgttggcggtgtcgttgaagaatttgttgccgtcgtttggtgctttgaagggtgccgctggcgggcttggtggcgtgtttcgcgctctggggggccctgtcggtattgtgatcgggctgtttgctgccatgtttgctacgaacgcccagttccgtgccgcggtgatgcagcttgtggctgtggtgggccaggccttggggcagatcatggccgctattcagccactgtttggtttagttgctgggctggtggcccagttggctcccgtttttggccagattatcggtttggtggctggtttggcggctcagcttgtgcctgtgattggtatgctggttgcccggctggttcctgtgatcacgcagattattggcatggtgacacaggttgctgccatgttgctgcctacgttgatgccggtgttgcaggctgttgttgctgtgatacggcaggttgttggcgtgatcatgcagttggtgcctgttttgatgcctgtgattcagcagattttgggtgctgtcatgtctgtgctgccgcctatcatcggccttatccggtcgctgataccggtgatcatgtcgattatgcgtgtggtggtgcaggttgttggtgccgtgctacaggtggtggcccgtattattccggttgttatgccgatttatgtttcggtgattggattcattgccaagatttatgctgcggttatcgtttttgaggctaaggttattggcgctattcttcgtgctattacgtggattgtgaatcattcagtgtctggcgtgaggtctatgggcacggccatccagaatggctggaatcatatcaaatcgtttacgtcggcgtttattaacggtttcaagtcgatcatttctgccggtgttgccgcggttgtggggttttttacgcggcttggtttgtcggttgcctcccatgtgaggtctggttttaacgcggctcgtggcgctgtttcttctgcgatgaatgctattcggagtgttgtgtcttcggtggcgtctgctgttggcgggtttttcggttcgatggcgtcgagggttcgtagtggtgctgtgcgcgggtttaatggtgcccggagtgcggcttcttctgctatgcatgctatgggttcggctgtgtctagcggggtgcatggtgtgctgggttttttccggaatttgcctggcaatattcggcatgctctcggtaacatggggtccctgttggtgtctgctggccgtgatgtggtgtctggtttgggtaatggtatccggaatgctatgagtggcttgttggatactgtgcgtaatatgggttctcaggttgcgaatgcggcgaagtcggtgttgggtattcattccccgtctagggtgtttcgtgatcaggttggccgtcaggttgttgctggtttggctgagggtattactggtaatgctggtttggcgttggatgcgatatcgggtgtggctggtcggctgcctgatgcggttgatgcccggtttggtgtgcgttcgtctgtgggctcgtttaccccgtatggcaggtatcagcgtgcgagcgagaagagtgttgtggtgaatgtgaacggacctacgtatggggatccgaacgagtttgcgaagcggattgagcggcagcagcgtgacgctttgaacgcgttggcttacatgtgatatggggtgttgtgcatgtttattcctgacccgtctgatcgtgccggtttgactgttacctggtctatgttgccgttgattggtaatgatccggagcgtgtgcttcatttgacggattatacggggtcgtcttcggtcatgttgttgaatgattcgttgcgcggcctgggtgttcccgaggtggagcatttttctcaaactcatgttggggtgcacggctcggagtggtgcgggtttaatgtgaagcctcgcgaggtgacgctgccggtgttggtgtcgggtgttgacccggatccggatggcgggtttcgtgacggtttcatgaaggcgtatgacgagttgtggtctgcttttcctcctggcgaggagggggagttgtctgtgaagactcctgccggcagggagcgtgtgttaaaatgccggtttgattcggctgatgacacgtttacggttgatccggtgaatcgtggctatgcgcgttatgtgcttcatttgacagcttatgacccgttttggtatggggatgagcaaaagtttcgtttcagtaacgcgaagttgcaggattggttgggtggcggcccggtcggcgggaagggtacagcgtttcctgtggtgttgacgcctggtgttggttcgggctgggataatctgtataataagggtgatgtgcctgcgtggcctgtgattcgtgttgaggggcctttggagtcgtggtctgtgcagattgatggtttgcgtgtgtcttcggactatcctgtcgaggagtataattggattactattgatacggatcctcgtaaacagtctgcgttgttgaatgggtttgaggatgtgatggatcgtttgaaggagtgggagtttgcgcctatcccgcctggcggttcgaagagtgtgaatattgagatggttggtttgggtgccattgttatgtcggtgcagtacaggtttttgagggcttggtgaacggttgtggctggtcttgttccgtatgtaacgttgtttacgccggattatcgccgtgtggcgcctatcaatttttttgagtcgttgaagttgtcgttgaagtggaatggtttgtccactttggagttggtggtgtcgggtgatcattctaggcttgacgggttgactaggccgggtgcacggctggttgttgattatggtggtggccagattttttctgggcctgtgcgtcgggttcatggtgtgggtccgtggcggtcttcgcgggtgactatcacgtgtgaggatgatattcgcctgttgtggcgtatgttgatgtggcctgtgaattatcgccccggtatggttggtatggagtggcgtgccgacagggattatgcccactattcgggtgcggcggagtcggttgctaagcaggtgttgggggataatgcttggcgttttccgcctggtttgtttatgaccgatgatgagagtcgtggccgctatattaaggattttcaggtgcggtttcacgtgtttgccgataagttgttgccggtgttgtcgtgggctcggatgactgtttcggtgaaccagtttgagaatgtgaagcaggatcagcgtggtttgctgtttgattgtgtgcctgctgtgacgcgtgaccatgtgttgactgccgagtctgggtctattgtgtcgtgggagtatgtgcgtgacgccccgaaggctacgtcggtggttgtgggtggccgcggcgagggcaaggatcggctgttttgtgaggatgttgattcgatggctgagggtgactggtttgatcgtgtcgaggtgtttaaggatgcccgtaacacggattctgagcatgtgcatctcattgatgaggcggagcgggtgttgtccgagtcgggggccacgtcggggtttaagatcgagttggctgagtcggatgtgttgcggtttgggccaggcaatctgatgccgggtgatttgatctatgtggatgtgggctcggggcctattgcggagattgtgcggcagattgatgtggagtgtgtatcgcctggtgacggttggacgaaggtgactcctattgcgggggattatgaggataatccgtcggccctgttggctcgccgtgtggctggtttggctgcgggtgtgcgggatttgcaaaagttttagtaagtgattggggtttgttgtgggtattgtgtgcaagggttttgatggtgtgttgaccgagtatgattgggctcaaatgtctggtctgatgggtaatatgccgtctgtgaaagggccggacgattttcgtgtcggcactactgttcagggtgccacagtgttgtgtgaggtactgccggggcaggcgtgggctcacggggtgatgtgcacgtcgaatagtgttgagacggtgacggggcagctgcctggtccgggtgagacccgatacgactatgttgttctgtctcgggattgggagcagaacacagccaagttggagattgttcagggtggccgtgcggagcgtgccagggatgtgttgcgtgccgagcctggcgtgtaccatcagcagttgctggcgactttggtgttgtcgtctaacgggttgcagcagctgctggataggcgtgctgtggcggcccgtgtggcgtttggggagtctgcggcttgtgatcctaccccggtggagggtgaccgggtgatggttccttctggggctgtgtgggctaaccatgccggcgagtggatgctactgtcccccaggatcgaaactggttctaagtcgatcatgtttggcgggtctgctgtgtatgcttacacgatcccgtttgcccgcccgtttggtagtccgccggttgtggtggcgtctatggctacggcggctgggggcacgcagcagatcgatgtgaaagcctacaatgttactaataaggattttggtttagcgtttattacgaatgatgggtctaagccttctggtgtgcctgcggttgcgaattggattgctgtcggcgtgtgaccgggctgttgcggctgatgttgtaatgttgggtggctgtggtgtcgtggattactcctgcactggtggcttctatctgtacggcgttggccacggttttgggttctgttccggcggtcacgtctaaatctcggaggcgtttgcggcggctgtcggctcaggtggatgctttggaggagtatacgtggggtgtgcggcgtgaggttcgccggtttaacgccgggcttcctgatgatgtggagccgatgcatctccctgatgtgcctgagtttttgaaagatactgttgatggtggaggtgagcagggttgagggagttggaggaggagaagcggcagcgccgcaatttcgagaaggcttcactgatactgttgttcctgtcgcttgtgctgttggcggtggttgccgggggtgctttacggtacgggtttgtggcttcgcaaagggattcggagcaggcgagggcccagtctaatggtacagccgctaaagggttggccaaccgtgtgaagcgggtgtgtgcttcgggtgggcaggagtcggtgcggcttcaccagtctggcttgtgtgtggatgctcagcgtgttgagcggagtgtgcagggtgtgccgggtcctgccggtgagcgcggcccgcaaggccctgcaggtgctgacggccgggatggtgttaatggttcagctgggctggttggccctgttggtccgcagggttccccgggtttgaatggtgtgaaaggtcctgacgggctgcctggcgctaacggttcggatggccatgatggtgttgccggtgtgaacggcgttgatggccgggatggcgctgatggggctgatggtggccgtggccctgccggccctcaaggtgcacagggtgagcgtggccctgtggggcctcagggtccgcagggttctgccggtgccgatggcacgaatggtcgggacggcaaggatggcaaggatggccgttctgttgtgtctgtgtactgttccggggatcgcctggttgtgaaatatagtgacggtgcggtctctaccatatcgggttctgtggcctgtgagggtgtgaaaccgtcgcctatagtgactatatcatcccacaaatagaaaggagtggctgtgatggtagtgtttgggggtggcgtgttgtgagatacattccagcggcgcatcactctgccggatcaaataagccggtgaacagggttgtgattcacgcgacatgcccggatgtggggtttccgtccgcgtcccgtaaggggcgggcggtgtccacggcaaactatttcgcgtccccatcggcgggcggttctgcccattatgtgtgtgatgttggggagacggtgcagtgcctgtccgagtctacgattggttggcatgccccgccgaatccgcatagtttgggtatagagatttgcgcggatgggggttcgcacgcctcgttccgggtgccagggcatgcttacactcgtgagcagtggctggatccgcgggtgtggcccgctgtggagcgtgccgctatcctgtgtcggcagttgtgtgacaagcatggtgttccgaagaggaaactgtctgtggccgatctaaaagcgggtaggcggggcatctgcgggcacactgatgtgacggatgcgtggcaccagtcggatcatgacgatccgggaccgtggtttccgtgggacaggtttatggctgtggtgaatggccacggcggcggttcaagtagtgaggagttaacggtggctgatgtgaaagcgttacataatcagattaaacaattgtctgctcagcttagtggttcggtgaataagctgcatcacgatgttggtgtggttcaggtgcagaatggtgacctggcgcgccgtgtggaggccttgtcgtgggtgaagaatccggtgacggggaagctgtggcgcactaaggatgccctgtggagtgtctggtattacgtgttggagtgtcgcagccgcatcagtaggctcgagtctgctgtcaacgatttaaaaaagtgatggtgatgtgtgatgggtaaacagttttggttaggtttactggagcgggcggctaagacttttgtgcaaacgtttgttgctgtgttgggggtgacggcgggtgtcacgtatactgcggagtcgtttcgtggtttgccgtgggagtctgccctgatcacagctacggttgctgcggtgttgtcggttgctacatcgtttggtagcccgtcgtttgtggccggcaaacctaaaaccacgcctgtggatgcttggcttgttccacccgacgatgggggcatggtcgagcctcacatggttgatgtgtcggatcctggcatgattgagccgatggatgatgcggatgttgtcggctatgagcctcggcgtgcagccgaggctgaggttggcacggtagagtctactgttgcataattgaatatgtgtgtgccccagcggtgctgccacgatcgtgtggtggttgccgctggggcactatttttgtgtctatagtattctatgattcgttgttgttgatggtttcttcgatcagctggtccaggcggtggcaggcggagatcgtttcgttggcctggtgcggaacatcctggccgataacatttttgtggttgtcgcggtggcagatgattgactgcatgatatcgtcggcctccgcttgcagtagttttgcctggtatgcgatcccggcgagccaatctatggcttcctggcttgcctgtgtgtcgtatggaatgccacgggtgttgctgttgtttgggtatcctgcactgtcgcagtcccacaggatttcgctgcactcgtctagcgtgtcctggtcgatagcaaggttgtcgaggctgacttctttgacggtaaggttcacgttgtcgagtgagatgggtacacggtactggttttctacactgtcaacaatgttttgcagctggttcatgttggtgggctgttgttggatgattcggtgtaccgctgttttgagggcagtgtaggtgatattggttgtgttgttcatggttttatttcgtccctgtgctgtcgtcgctatcgtctggatagtatctactgtttgcgtagcctgttagggtgatgagtgtttggtctgcccactgtttcacggtttgccgggtgactccgagtcgttgggctgccacagagtaggtttggtcatacccgtagacttcccggaatgctgccagcctagctaaatgttttcgctgtttggatggctggcaggtgagggtgtagtcgtcgatggctagctgcaaatcgatcatggtaacgatgttgttgccgtggtgttgtggcgcggttggtgggggcggcattcctggttcgactgatggtttccatgggcctccgttccagatccattgggcggcttggatgatgtcggcggtggtgtaggttcggttcactggtcatcccctgaataggttgtcgaggttgtctgggttgctggtgttggtggtgtcgaatcgtcccacacagtggcagtagtcgtacatgagtttgataatgtgttggtggtctcccaaataggtgtttccgctgatgctgtaggtggctgtgccgtctttactgatggtgtatttggcggtgatggtttcgggtgtttctgtgttggtgatgatggctgtggtggtggtgcctacggtttgtagcctggtggtttgggtgccgtcgtcgaggatggttgtgaccatggtgtgtgttctcccctttcagatgctggtttggttgtcggctagatgaatgatatcggttaaaggtttcggttggtcgaggtgttgtatggttttgttggctagccgtttggctaccctgtagcacattttggtgtagtgtttgttgtctaggttgtggtattgttcccgcaccgcaatgtatagcaaagagtcttggtacaggtcgtctgcactgattgcggggtagtgtccggctgttttggtgcatgcccggttgagtgtgcgtagatgatggtctgtggcccatccccacgatgcggtggtggctaggtctgctttggttggtcgtctgctcatgtcatctctttcatctggctatctggtagttgtttggtgttttgttgttgatagtgtagcacacgagtccggggtttccggtggtgcctgtcttgtgccggtaccatgtggattcgccttccatggatgggcattggatgaaggtgcgttgtccttgctcggagatttcgaggtggtgccggtgcccggccatgagaatattagatacggtgccgttgtggaattcttggccgcgccaccaatcatagtgtttgccggtgcgccattggtggccgtgggcgtgcaggatttgtgtgcctgccacgtcgacggtggtggtcatttcgtctcggctggggaagtggaagtgtaggttggggtattggttgttgagctggtaggcttctgcgatggcgcggcagcagtccacgtcgaaggagtcgtcgtaggtggtgactccttttccgaagcgtacggcttctccgtggttgccggggatggatgtgatggtgacgttggcacagtggtcgaattggtggatgagttgcatcatggccatgcgggtgagcctgatttgttccgtcaagggtgtttgtgtgcgccaggcgttgttgcctccttgtgacacgtatccttcgatcatgtcgccgaggaaggcgatgtggacccgttgcggtttgcctgcttgctgccagtagtgttttgcgactatgagggagtgcaaatagtcgtcggcgaagtgtgctgtttctcctccggggatgcctttgccgatttggaagtctcctgccccgatgacgaaggccgcagtgctgtagtcggtgtgggtgtcttgttcgggttttgggggtgtccattcggctagtttgttgacgagttcgtcgaccgggtaggggttggttgcgggttggtggtcgatgattttttgtatggatcggccggtttctccgttcggtaaggtccattcggagatgcgtgtgcggcgtacggtgccgttggcgagattgtcgtcgatggtgtcgatggcgttgtcgtggttggctagctgtgtgagtagccggtctatattgtctatcactggttttcctcttctgtttgtggggtggtgttggcttgtttgcggcgatagtctttgatgacggtggcggagatggggtatccggcttcagtgagcatttgggctagctgtgtggcggggatggacctgtcggcgagtacgtcggcagccttatcaccgtagcgttggatgagggtttcagttttggttgccatgatgtcctaggggttgtgtggtgggttgccatcctgtgcggcagtcgccgtcgtgtcctggtttgcgggtgcaccatgatacgttgctggcattgtggatgatggcgcggccgcatatgacgtcttgtaggtgttcgggaaacttgccgttgttgtccctgtttgtgtcggtcacgtgtggggttgtggtgaccatcatgtctcctctgcgtgaaagagtgtgcaaatatgatgcgggtgtggtgggtgtttatgcgggtatggttttcatcaccttgctgaatgttacttggttattgtacatcatttgggtgatttcctggtcggttttgtcggggtgttgttttcgcaggtttgcccattggcaggcgttgtcggtttcctgctgtaaacgtgtcaggtgttgttcgttgatgatgtgtttccacatggtccatgacacgtcgagccggttaaggatttcgagggctggcacgttgaactggtcgaggaagagtatttcctccgtgtagtagtctttttcgtattggtcccatccgcttcggtgcctgttgggctggtttttggggtaggcttcccggcagattttgtgtaaccgttttgccatgtcgtcgggtagtttaatgtcggggttggcgcggatcatggatcgcatcccgtcgtaggtggtgccccaggtgtgcatgatgtggagtgggtccacgccgtcggcccatttttctgcacagatggcgaggcgtgtgcgtctcctagtggccttactcgtgtcgcggcggccggggatggggcatgtgtcgaggggatccatgatgttttctatgcctttcttggagtgatgttttgtttgtctggttttattgtagcacagtgtctagtgcttgtgtcaaccctgtttttccggcctgcagataggtgtctgtgacatccccgacagtgaggggtacgtgtatggcttgggggagtgccgtctggagggtttgggccatctggtctcctgctttgtcggggtcggaccagatgtagattcggtcgtagccttcaaaaaatttggtccagaaagtttgccacgaggtggccccgggtagggctacggccgaccatccgcattgttcgaggatcatggagtcgaattcgccttcgcaaatgtgcatttcggctgccgggttggccatggcggccatgttgtagatggagcctgtgtcccctgccggggttagatatttggggtggttgtgggttttgcaatcatgctggagtgagcagcggaaacgcatttttcgtatttcggctggctccccccagacggggtacatgtatgggatggtgatgcactggttgtagtcttcgtggcctgggatggggtcattgtcgatgtatccaaggtggtggagccgggctgtttcttcgctgatgcctcttgccgagagcaggtcgagtatgttttcgaggtgggtttcgtagagggctgaggctttctggattcggcggcgttccgcaatgttgtagggttgtagtgagtcgtacattagggttttctttctctagtcgttgtttcagtttggcgaggcctcctccgataccgcatgtgtggcagtaccagacgcccttgtcgaggttgatgctcatggagggctggtggtcgtcgtggaacgggcagaggatgtgttgctcgttcctggaaggattgtagcgtatctggtaggtgtcgaggaggcggcaggtgtcagaggtgtgggaggagctcgttgagggttgataccacataggcttcgctccagggtttgttgcgctgtttcatgatgacgagtccgatggtggactggttttcgcggttgcggtgggtttcgtagttgcgtgcctcccggctggcttgtttcacgaattcggcgaggtggggctgtccggctttggcttctattacataggttttgtggccggttgtgaggatgaggtcgccttcgtcttcccttccgttgaggtggaggcgctctatatcatggccggtgtcgcgtagctggtggaggagtcgtgtttcccattctgcgccggcccggcggttgcgtgactgttgtgtcgacatgatagtcctttgtgtgttggggtcatgttccatggctgtttttcggcgagtggcccgaagaatgtgtattcggggtaggctcgcagtcgttcgtatcgggtgccgtctgggctggatttgcctgtgcgctgttttaacacggcgatgcgtgcctctgccggtatcgataggccgttgccgttatcctcgccaccatacagggagactcccaatatgagttgtggtttttcggagaggccgtttttgatttcccgcctagccggggggtgttctatgtcggagccggttttgtcggttgcgtggtgtgtgacaataatggtggagccagtatccctgcctaatgatgtgatccattgcatggcttcttgctgggcctgatagtcactctcgcagtcttgaatgtccatcagattgtcgataacaatgagtggtgggaaggtgttccacatttccatgtaggcttgcagttccatggtgatgtctgtccatgtgatgggtgactggaatgagaatgtgatgtgttggccgtggtggatgctgtctcgatagtattctggcccgtagtcgtcgatgttttgttgtatctgggcggtggtgtgttgggtgttgagtgagatgattcgtgtggaggcctcccagggtgtcatgtcccctgatatgtagagggcgggctggttaagcattgctgtgatgaacatggctagcccggatttttggctgccggaccgccccgcgatcatgaccaaatcccctttgtgaatgtgcatgtccagattgtcatacaagggtgctagttggggtatgcggggcagttcggcggctgtttgggaggctctctcgaaggatcgttgtagagagagcatcggagcctttatctatctgtctatcggttggatgatgttttggtggtcagatggagtcgatatcgatgtcagcatcagcaggggctgtggtgtcgtctagctggccgttatcgcgtttgtctacgtattcggcaaccttatcgtagatggcgtcatcgaggggtttaagcacgaccgcgttgaacccgtttttggtgcgcacggtggcgagtttgaaggcctgctcctcgccaaggtatgcctctaggtcgcggatcatggagtgtgggcggtcgttgttgccgcgtgctttctcaataatagcgttggggatggtttctggggtgccgttgttgagatcgtctagggtgtggaagattgtgacatcagcgtaaatacgatcggcggtctgtccaccgtagccttcggtgttgtgttccacgtctcggactttgaaggcgatggcggtggcgtcctggtttcgggacgggttgaagaaggtgctgttgctgttgttgttgcggtagttggcgagtcccattgttgtttcctttactgtttgtgttgttttgtttgttggtttgtgtcggttttatcgggtgaggctgtttcgtttgttgcggaaagcctcggatacgtcactgttgctggtgatggtctttttgtattgtttgagaaggtcggctagctgtgccttgcttgtggctttgttgattttgtcgatgatggtgttgtttccttctgaggcgatgttgtctacgtagtctttggcggcctggttgtatcggtcttggaggatgatggatgctgtggcgatcagtgttgccaggtcccagttccttgccgcggagctgtttttgagtccgcctagcaggtcgatgatagtcttcttgacttggtcggcggtgtctccgcggatgacggtccatggggcggcgtagtcgcctccgtatttgagtgtgacggtgaatcggtcgtcgtctgtgttgtcggtcactggtgctccttgctttcttgtgttggggctgtgatggtggtttctatagggtacctgtaggcgtctttcccgttgacagcccagcaggcgtccttgacggggcagcctttgcagagtgctgtgacgtggggtacgaagatgccttggctgattcctttcattgcttgactgtacatggatgatacatgccggtaggtgttgttgtcaaggtcatagagttcggtggatgtgccttgtgtcggggacttgtcgtcgttgcggctggtggctggcgtccaaaacatgccttttgtcacatcgttgccgtgttggttgagcatgtacctgtaggtgtgcagctgcatactgtcggcgggtaggcgtccggttttgaggtcgagaatgaaggtttcgccagtatcggtgtcggtgaaaacgcggtcgatgtagccaacgatctgggtgccgtcctggagggtggtttctaccgggtattcgatgcctggctggccgtcaataacagcgatagcatattctggatggttgcgcctccagtttttccacctgtccacaaaggtggggccgtatatcatccaccaattgtagtcttttttgtgtggcccgcccgactcgcacatgtttttgcacaccctgccggagggtttgatttctgtgccttcggattcggcgagggcgacttgggtgtcgaaaatgtttttgaaggatgagagtttgtctggtagtgcagggtattcggtggggttgtacaggtgtaggtcgtattgttcggtgatgtggtgtatggcgcttccggcgatggtggcgtaccaggtgtggtgttgggcgtggtagccgtgggataggcgccatttttctccgcattcggcccactgtgacagtgatgagtaggagatgtggcctggatggtcgatggtggatggtttttgtgctagggacattacttgtcgcctttgtgggtgttccatgggttgcgggtgtcttggccggcgtggtgttgctggtatgcgaggagtgcgaggcagtgccaggcagcatgggctagatggggtagcccggattcatcatcgaggttgttgccttgctgccatgatagtaggtgcctgtagagggcgtcgacgctgtggctccacgggtagccgccggtccagttgttgtcgccgtatttggtggcgccgtatcctgccacggagcctagatcgtgcaaggctgcggggtcgatgagggatagcctgcagagtttcaattcttttcgggcaccggtgttggggtcggtgtacatgcgggtgggctcatccatggggtgtgtgctccttgagtgtgggttactggttggggttgtgggcgagtgctacggcgagaataatgatggcgagggtttcagcaataagtatgggtgttgtgatcatttagtgtctcggggattgttggtgagggttgaggcgcctaggagggtggtgagggcgcatgcggcgatgatggcgagggctgccttgtgtggggtgccggttgcgtacatccatgtgatgatggcgccttggatccaggcgaggctggtgaagaacgtttcgtagctgtgtagctcaatgttgttgggtgtgttcatgcttgctcctgaagaatggtgttgatggttttataaatgttgtacaggtcggtttcgatagataacagttggtggatttcgtggtcgagatcaatgtctgggttgagggtgttgatgcgggaggcaatatcggtggctgtgcgtagtgtgccgccggtgtggtgaataatgtgtgccgtgtcggcgagtccggtggtgacagcgtagtgggagaggagaggcatagctggggggtgctccttggcgggttactgttgcgggttgatgttgaggtcggtgacgtgcgggtggtcttctgttccggtgacgaggcagtggacggtgacgggtagtttggatgctcccggctggcggacggtggcgccgtagacgatggagaaggtgtctttgccaataattttgtggagttggaggtcgatgtcggggttgccgttccagttgacaccgtgtgcggcggcctgttgttcggctttgcggttgcaggtgtgtgcggccgtgatcatggtgagaccttgtgaggtttcttcaccccttgtttgggcttgccggtgggctttccgctgttcggctcgcagtgactgttctgcggctgcctgccgtgctttcttgtcggctttgcgctgttggacggttttgggggtccattcggtgttggctgtggtggcctgtggggcgggttgtgaggtgagtggcggattgtcgtctggggctggcatgaatgaggcggcggcaatgatggcggctgtgattccggcgatggtgtagcctgttttcttgttcatgattgttgtcccctttccggggtgttgttcgttgctgacatgatcaatacttccagtgactggacctcgtgtcaaggctgcgctcaacgattgtgagcgatcattgtatggctaggggttttatcggctgtacagggtgagtaggtggccaacattgatacgggtcacgttccagtagagttgtgtggcttctccaccggtgagcggcttccactcgtcgtggctgaacacggtgccatcggatgcgatgaatgtgttggggcgtagcttgtggagttcggcttccacgctctgccggtaggcttcggcgaggctctcaaaatccatgtggtcgcaggagaggttttcgaggcgtgtcaggtcgaagggtgtggggcagtcgtagctggcggggctgtagagctgggtgaagtggttggcgatcttctgcatcatgattccttttctggtgatggtgtgttgatggttttatcgtgtggcttcggcgatgatagcgtcgaggtcgatcatgtcgatcatgtcgtggagttcctcagcctcattctcagataggtggcgccagtcacagtctccgtatacggcgccgtcgagggtgacagtccacagtggccggatgagtcgtatggcttcttgtactttagcgtggtacatgcggcgcaccatatcgagatcgatgtcgtctgaatggtttccggtgaggctgtggaggctgagcgggtcgatctcggtctgcccgtagagggaggtgatggatggggtaatgagtgtggtggccatttttggtgtgttcctttcggtggtgtatgggttgttgtggtttctagagtgtgcgggctgcgaccccacagtcaaggctgcgctcattcggattgagcgtttcatatgagtgtggcatgggatgtggtgtatctcacttaagcttttattgcctctctcagcgtctcaaatcttctggaggtaggagattatagggttggccctgctgatcgattctaggccccatacagggcgtctcaggggcatgtatgggtgatagcgggtgtggcagatgatctagcgagtcgagatagtcctgcattgtaaaggtcgaggtgtcagatctgggcatggaatccacacccccatactatgtgagatgtatcacatcctcctgacttggtgtgcaccctcgaggccatcctgtcgatctggcgtgaagggtgtagcccagaaatgccgtttaaagccttcacactgcgcctaggagcgccttgcagggtgggggctaggtgtttatacccccaagcaattctgatcgattctagacgcctcccagagcctgatacgcgatccgctatccagacacagaccatcagcccctatcctggttagctaagcctcaactatgtggacagtgtgggatgctaagagggaagaaggacacggtacaagaaagagggggagcatcagccttcaagccttaaggtcttagcgcttggcaccgagcccctcaagggcttggcatcagcccgacagcccgagcaggctcagccgaacaggcacagcaatgaaaagggtacacgccatcagggaaggtttgagagtacgaggagccctagcgacgagtactctcaaacctgagggaacaccctcagcactgatgggcctagcgtgttcggaaaggacacgggtcaaggtgtgacagctgtccgggagtgaaacccgttctgactaggggtttcagccttaaccaccctcaaaggttacaagaatctaagaaaatttaaggaaaagtttaggtttaatttttggacctttactaccaaaaacacccgtttacacccctcaaacccgcctatagagccaaaaccaccagtttgactcatcccaggtggggtatgataggctggacaggtagccagctggacgcaaggccgaaatccgctgacgcggctttcacccttacatccatcagtctaccaaacacttaaagacataagggcttagcgctaaggtgctgatagcttagcaccgagcccctcaagggctcggcatcagtcttaaagccttcaacacttaaagtacatataaaactttaaaagttaaacgttaaaagctttaaaccttaacacctaagttaagtataaaaccttaaaagcttagcacttaaggatataaactttacatcagtgtttaagacttaaaaccttaaagctttaaacacttaaagtaactataaaacattaaagaccttaagtacttaaagttaaccatcagtcttaaactttattattataacctataagtcttaaagcttataggtattataatataatataagttataaaagttttagaagagctaaggggttaacttctttacttctcttctctctttggtactttctctcttctcttcttttcttcatcaggggagaagaggaacctttaccatcagcgccgatgggctttcaccgtgtgactcgtgtaccaccggtcgcacgctcccggttgcacactccccacacttactctacccgtgtccctttcaggcttggcgtgttcggctgaaggcgtacggcgtgtcacgctctcatccttaacaccgggtgagacttaaagtgtatattatatgtagaagactttaaaacctatcaggtgttcccgcttagcccgtgtcctacatcgccaagcgctaagccttgaaacgcgaacacacacccacccccatttttcttccgtatccttctcttttaacacagctggggggcgatgtgatctttctcacacccaggggggtggtggagaaaacaaacaccccggcacaaacagaacaccccctcaaacgaacaaaacagggcctagaatcgatcagcagggcatcggtagggtattcatacccccaacggttcccaggccgttacaggggcaatgagaggctcacgggggcaaggggagatcaggggacgtgatggcacataccaaccgcaccgcatcctccgcccatcgacgctggcggcaacgactcatcacccaagcacgacagcaaggccaaaccacctgcccactctgcggagtcaccatcacctggggcacacacgacctaccaaccagccccgaagccgaccacatcacacccgtcagccggggaggactcaacaccctcgacaacgggcaaatcatctgcagaacatgcaacagaagcaaaggcaacagaacacaaccaaacatcacattccaacaacaaaccacaaaaacattgattccatggtgacaaacccgccaacccccaccggggacaccccctgcacaggcgtgcaagacc

SEQ ID NO: 34 - DNA, 29514 bp, unidentified
  source 1..29514: mol_type = unassigned DNA; note = Bacteriophage of P. acnes
agtgaaatacctcccttttgtggatttgtctgtttgtcgactttttgtgttggtggtgagtgttgtgcagcctgagcttcctgggtctcgtgaatggtgtgaggagacgcgtcgttggtggcgtgtgtggggtgaggatagccgcgcatcgtacgtgtcggatgaggagtggctgtttcttatggatgctgcggtgattcatgattgtgtgtggcgtgagggtcgcgcggatttggtggcttcgcttcgtgctcatgtgaaggcgtttatgggcatgttggatcggtattcggttgatgtggcgtctggtggccgtggtgggggttctgcggtggcgatgattgaccggtataggaagcgtaggggtgcttgatgtctcaggttgtgggttctcaggttcctcgtaaccgtgtggctgcggcgtattcggtgtctgctggcggtgatgctggggagcttggtagggcttacgggttgacgcctgatccttggcagcagcaggtgttggatgattggctggctgtcggtggtaatggcaggcttgcttcgggtgtgtgtggggtgtttgtgcctcgccagaatgggaagaacgcgatccttgaggttgtggagttgtttaaggcgactattcagggtcgccgtattttgcatacggctcacgagttgaagtcggctcgtaaggcttttatgcggcttcgatcgttttttgagaatgagcggcagtttcctgacttgtatcgtatggtgaagtcgattcgggcgacgaatggccaggaggctattgtgttgcatcatccggattgtccgacttttgagaagaagtgtggctgcagcggttggggttcggttgagtttgtggctcgtagccggggttctgctcgcgggtttacggttgatgatttggtgtgtgatgaggctcaggagttgtcggatgagcagttggaggctttgcttcctacggtaagcgctgccccgtctggtgatccgcagcagattttccttggtaccccgcctgggccgctagcggacggtagcgtggtgttgcgtcttcgcgggcaggctttgtcgggtggtaaaaggtttgcgtggacggagttttcgattcctgacgagtctgatccggatgatgtgtcgcggcagtggcggaagcttgcgggggatactaatccagccttgggtaggcgtctgaattttgggaccgtgagcgatgagcatgagtcgatgtcggcggcaggttttgctcgggagcggcttggctggtgggatcgtggccagtctgctacgtcggtgataccggccgataagtgggcgcaatccgctgtggatgaggtttctttgtctggcgggaaggtttttggtgtctcgttttctcgttctggggatcgtgtcgcgctagctggcgccggcaagactgatgctggggttcatgttgaggtgattgatgggctgtctggcacgattgttgatggtgtgggccggttggctgattggttggcgttgcgttggggtgacactgaaaagattatggttgccgggtctggtgcggtgttgttgcagaaggctttaagtgatcgtggtgttccgggccgtggcgtgattgtggctgatactggggtgtatgtggaggcgtgtcaagcgtttcttgagggtgtcaggtctgggagtgtttctcatcctcgtgccgattcgaggcgtgacatgttggatattgctgtgaggtcggctgtgcagaagaagaaaggttctgcgtggggttggggttcctcgtttaaggatggttctgaggttcctttggaggctgtgtctttggcgtatcttggtgcgaagatggcgaaagctaggcggcgtgaacggtctggtaggaagcgggtgtctgtggtatgaactcggatgagttggctctgattgagggcatgtacgatcgtatccaaaggttgtcttcgtggcattgccgcattgagggctactatgagggctctgcccgggtgcgtgaccttggtgtggctattccgccggagttgcagcgggtgcagacggtggtgtcgtggcctggtatagctgtggatgctttggaggagcgtctggattggcttggctggacgaatggtgacggctacggtctggatggtgtgtatgctgcgaatcggcttgctacggcttcgtgtgacgtgcatttggatgcgctgatttttgggttgtcgtttgtggctgttattccccagggggatgggtcggtgttggttcgtccacagtcaccaaagaattgcactggccggttttcggctgacgggtctcgtttggatgcgggtttggtggttcagcagacgtgtgatcctgaggtggttgaggctgagcttttgcttcctgatgtgattgttcaggtggagcggcggggttcgcgtgaatgggttgaggtggatcgtataccgaatgtgttgggtgctgttccgcttgtgcctattgtgaatcgtcgccgtacttctaggattgatggccgttcggagattactcggtcgattcgtgcttacacggatgaagcggttaggactttgcttgggcagtctgtgaatcgtgacttctacgcctatccgcaaaggtgggtgactggcgtgagcgcggatgagttttcgcagcctggctgggtgttgtcgatggcttctgtgtgggctgtggataaggatgatgacggtgataccccgaatgtggggtcgtttcctgtcaattcgcctacaccgtattcggatcagatgcgtttgttggcgcagttgacggcgggtgaggctgcggttccggagcgctatttcgggtttatcacgtctaacccgcctagtggggaggctttggctgcggaggagtctcggcttgtgaagcgtgctgagcgcaggcagacgtcgtttggtcagggttggttgtcggttggtttcctggctgccaaggcgttggattctcgtgttgatgaggccgcgtttttcggtgatgtgggtttgcgttggcgtgatgcttcgacgccgactcgggcggctacggctgatgctgtgacgaagcttgttggtgccggtattttgcctgctgattctcggacggtgttggagatgttgggtttggatgatgtgcaggttgaggctgtgatgcgtcatcgtgctgagtcttcggatccgttggcggcgctggctggggctatttctcgtcaaactaacgaggtttgataggcgatggcttcgggtgctatgtcgaggcttgctgcgactgagtatcagcgtgaggcggtcaggtttgctgggaagtatgcgggctattatgccgagcttggtcgtttgtggcgtgccggcaggatgagtgacacgcagtatgtgcgtttgtgtgtggagttggagcgtgccggccatgacggttcagcagctatggcagctaaattcgtgcaagattttcgccggttgaacggtgtcgatcctggtttgatcgtgtatgacgagtttgatgctgctgcggctttggctaggtcgttttcgactatgaaggttatgaatagtgacccggatagggcgaatgatactattgatgctatggcggcgggtgttaatcgggctgtcatgaatgctggccgtgacacggttgagtggtctgctggtgcgcagggtaggtcgtggcgtcgggtgactgatggtgatccgtgtgctttttgtgccatgttggctacgaggtcggattatacgactaaggaaagggcgcttactactggtcatactcggcgtcataggcgtggtggtaagcgtccgcttggttcgaagtatcatgataattgtggttgtacggtggttgaggttgttgggcgttgggaaccaaatagggctgatgccgagtatcagcgggtttatgagaaggcccgtgagtgggttgatgatcatgggttgcagcagtcgcctggcaatattttgaaggctatgcgtactgttggcgacatgagatgataggttccggttgtgcaccgccggttatcggtgcacatggttgtctcccgcacgggggccaacaagttagtgttgttttccgcaaggagtgtaaggttaggctatggccgatcagaatgttgaggaacagaatgttgacaatgatgttgttgagtccgaaaaggataatggcattgttgatacagtaaaagacgatggcgggcaggatgtagccgacaatcagttgaagaatgaaggcgagggtaaatcgtcggggactgattggaaggctgaggctcgtaagtgggagtcgcgtgctaaaagtaatttcgccgagttggagaagcttcgtacatcgagtgacgattctggatctactattgatgagcttcgccgcaagaatgaggaactcgaggttaggatcaacgggtttgttcttgagggtgtgaagcgcgaggtggccgccgagtgtggcctgtcgggtgatgctgtcgctttcttgcacggtagcgatcgtgaagcactggtggagtctgctaaggctttgaagggtttgatcgaccagagtggtggtggcgcgggtgtgcgccgtcttgcggggagtgcccccgttgatgatgttaaacgacgtgagggtgtcgcgtttgtggatgctcttgtcaataattctaggagatgatttctgatggctgacgattttctttctgcagggaagcttgagcttcctggttctatgattggtgcggttcgtgaccgtgctatcgattctggtgttttggcgaagctgtcgccggagcagccgactatttttggccctgttaagggtgccgtgtttagtggtgttcctcgtgcgaagattgttggtgagggtgaggttaagccttccgcgtctgttgatgtttcggcgtttactgcgcagcctatcaaggttgtgactcagcagcgtgtctcggacgagtttatgtgggctgatgccgattaccgtctgggtgtgcttcaggatctgatttccccggctcttggtgcttcgattggtcgcgccgtggatctgattgctttccatggtgttgatcctgccactgggaagcctgctgcggctgtcaaggtgtcgctggataagacgaatcatgttgttgatgcaaccgatagcgctacgaccgatcttgttaaggctgtcggtcttatcgctggtgctggtttgcaggttcctaacggtgttgctttggatccggcgttctcgtttgctctgtcgactgaggtgtatccgaaggggtctccgcttgccggtcagccgatgtatcctgccgccggtttcgctggtttggataattggcgcggcctgaatgttggtgcttcttctactgtttctggcgccccggagatgtcgcctgcctcgggtgttaaggctattgttggtgatttctcgcgtgttcattggggtttccagcgtaacttcccgattgaactgatcgagtatggcgacccggatcagactgggcgtgaccttaagggacataacgaggttatggttcgtgccgaggctgtcctgtatgtggctatcgagtcgcttgattcgtttgctgttgtgaaggagaaggctgccccgaagcctaatccgccggccggtaactgattcatttgttgcggtgatgttttctatgtgcagggggtggtgttgatgggtatcattttgaagcctgaggatattgagcctttcgccgatattcctagagagaagcttgaggcgatgattgccgatgtggaggctgtggctgtcagtgtcgccccctgtatcgctaaaccggatttcaaatacaaggatgccgctaaggctattctgcgcagggctttgttgcgctggaatgatactggcgtgtcgggtcaggtgcagtatgagtctgcgggtcctttcgctcagactacacggtctaatactcccacgaatttgttgtggccttctgagattgctgcgttgaagaagttgtgtgagggtgatggtggggctggtaaagcgttcactatcactcccactattaatggtcgatatgtacattctgaggtgtgttccacggtgtggggtgagggttgctcgtgcggatctgatattaacggctacgctggccctttgtgggagatatgatatgaccagttttccttatggtgaaacggttgtgatgcttcaaccgactgttcgtgtcgatgatcttggtgacaaggtggaagactggtctaagcctgtcgagactgtgtaccataacgtggccatctatgcttccgtttcgcaggaggatgaggccgcggggcgtgactcggattatgagcattggtcgatgcttttcaagcagcctgttgtgggtgctgattatcgttgtcggtggcgtattcggggtgttgtgtgggaggctgacgggtctcctatggtgtggcatcatccgatgtctggctgggatgctggtacgcaggttaatgtgaagcgtaagaagggctgatagattgtggctcaggatgtgaatgtgaagctgaacttgccgggtattcgtgaggtgttgaagtcttctggggtgcagtcgatgttggctgagcgtggcgagcgtgtcaagcgtgcagcctcggcgaatgtgggcggtaatgcttttgatagggcccagtatcgtgcagggttgtcgtcggaggtgcaggttcaccgtgttgaggctgtggcccgtattggcaccacatataagggtgggaagcgtattgaggcgaagcatggcacgctggcccggtcgattggggctgcgtcgtgatcgtttacggtgatccgcgtgtgtgggctaaacgtgtgctcaaggatgatggctggctgtctgggataccgtgtacagggacggtgcctgacgatttcagcggtgacctggtctggttggcgttggatggtggcccgcagttgcatgttcgtgagcaggtgtttttgcgggtgaatgtgttttcggatactccggatagggctatgtcgttggcgcgtcgtgttgaggctgtgctggctgatggtgtggacggtgaccctgtggtgtactgtaaacggtctactggccctgatttgctggttgatggtgcacgttttgatgtgtattcgctttttgagcttatatgtaggcctgcggagtctgaataagcttattttttgttttaatgtaattgtttgatatttaatgggggttgtgatggctgcaacacgtaacgcgtctaatgttcgctctgctgttacgggtgacgtctatattggtaaagctcatgccggtgacactattgatggtgtgaagacggttcctgacggtcttaccgctttagggtatctgtcggatgacgggtttaagattaagcctgagcgtaaaacggatgatttgaaggcttggcagaatgcggatgttgttcgcactgtggctacggagtcgtctatcgagatttctttccagctgatcgaatccaagaaagaggttatcgaactgttttggcagtcgaaggttactgccggatccgattcgggttcgttcgatatttctccgggtgccacgacgggtgttcacgccctgttgatggatattgtggatggcgatcaggttattcgctactatttccctgaggttgagcttgtcgatcgtgacgagatcaagggtaagaatggcgaagtgtacgggtatggtgtgacgttgaaggcttaccctgcccagattaaccataagggtgatgcggtgtctggtcgggggtggatgacggctttaaaagctgatactcccccggttcctccttctccgaagccagagactcctaagccgcctaagcctgagccggatcctaatccgccggccggtaactgatacactattttagggattgttgatagatgagtgacacaggttacacgttgaagattggtgaccgtagctgggtgttggcggatgcggaggagacggcgcaggctgttcctgcccgcgtttttcgtcgtgccgccaggattgcccagtcgggggagtctgcggatttcgcccaggttgaggtgatgttttctatgttggaggctgccgccccagcggatgcggtggaggccctggaggggcttcctatggttcgtgtggcggaggttttccgtgagtggatggaatacaagcctgacggtaagggtgcctcgctgggggaatagtttggctccacggcctgattgatgattatcgtggggccatcgaatacgatttccgcaccaagtttggtgtttctgtttatagtgttggtggcccgcagatgtgttggggtgaggctgtccggctggctggcgtgttgtgtaccgatacgtctagccagttggcggcccacctgaatggttggcagcgcccgtttgagtggtgtgagtgggctgtgttggacatgttggatcattacaggtctgctaatagtgaggggcagccggagcctgtggcgaggcctacggatgagcgtagggcccggtttacctctgggcaggtggacgatattttggcgcgtgttcgtgccggtggcggggtgtctcgcgagattgatattatggggtgaatagtgtatgtctggtgagattgcttccgcatatgtgtcgttgtatacgaagatgcctggccttaaaagtgatgttggtaaacagttgtcgggtgtgatgcctgctgagggtcagcgttcgggtagcttgtttgctggcgggatgaagttggcgcttggtggtgcggcgatgatgggtgccatcaatgttgctaagaagggcctcaagtctatctatgatgtgactattggtggcggtatagctagggcgatggctattgatgaggctcaggctaaactgactggtttgggtcatacgtcgtctgacacgtcttcgattatgaattcggctattgaggctgtgactggtacgtcgtatgcgttgggtgatgcggcgtctacggctgcggcgttgtctgcttcgggtgtgaagtctggcgggcagatgacggatgtgttgaagactgtcgccgatgtgtcttatatttcgggtaagtcgtttcaggatacgggcgctatttttacgtcggttatggcgcgcggtaagttgcagggcgatgacatgttgcagcttacgatggcgggtgttcctgtgctgtctctgttggctaggcagactggtaaaacgtctgctgaggtgtcgcagatggtgtcgaaggggcagattgattttaacacgtttgcggctgcgatgaagcttggcatgggtggtgctgcgcaggcgtctggtaagacgtttgagggcgctatgaagaatgttaagagcgccctgggttatttgggtgctacggctatggccccgtttttgaacggcctgcggcagatttttgttgcgttgaatccggttattaagtctatcacggagtctgtgaagcctttgtttgcgtcggtggatcaggggattcagcggatgatgccgtctattttggcgtggattaaccgtatgccggctatgatcactcgaatgaatgcacagatgcgcgccaaggcggagcagttgaagggcatttttgcgaggctgcatttgcctgttcctaaggtgaatttgggtgccatgtttgctggcggcaccgcagtgttcggtattgttgctgcgggtgttgggaagcttgttgcggggtttgccccgttggctgtgtcgttgaagaatctgttgccgtcgtttggtgctttgaggggtgccgctggggggcttggcggcgtgtttcgcgccctgggtggccctgtcggtattgtgatcggcttgtttgctgccatgtttgctacgaacgcccagttccgtgccgctgtgatgcagcttgtgggggttgttggccgggctttggggcagattatggtcgccttgcagccactgttcggtattgttgctggcgtggttgccaggttggcgccagtgttcggccagattatcggtatggttgctggtttggctgcccgactggtgcctgttattggtatgcttattgcccggctggtgcctgttatcacccagattattggtatggtaacccaggttgctgcaatgttgttgcctatgctgatgccggttattcaggctgttgttgctgtgatacggcaggttattggcgtggtcatgcagttgatacctgttttgatgccggttgtgcagcagattttgggtgctgtcatgtctgttttgccgccgattgttggtttgatacggtcgctgataccggtgatcatgtcgattatgcgtgtggtggtgcaggttgttggcgccgtgctacaggtggtggcccgtattattccggttattatgccgatttatgtttcggtgattggattcattgccaagatttatgctgcggttatcgtttttgaggctaaggttattggcgctattcttcgtactattacgtggattgtgaatcattcagtgtctggcgtgaggtctatgggtacggccatccagaatggctggaatcatatcaaatcgtttacgtctgcgtttatgaacggttttaagtcgatcatttctggcggtgttgccgcggttgtggggttttttacgcggcttggtttgtcggttgcctcccatgtgaggtctggttttaacgcggctcgtggcgctgtttcggctgcgatgaacgggattcggagtgttgtgtcttcggtggcgtctgctgttggcgggtttttcagttcgatggcgtctcgtgttcggaatggtgctgtgcgcgggtttaatggtgcccggagtgcggcatcttccgctatgcatgctatggggtccgctgtgtctagtggtgtgcatggtgtgctgggttttttccggaatttgcctggcaatattaggggcgccttgggtagtatgggctccctgttggtgtctgctggccgcgatgtggtggccggtttgggtaacggtatcaagaatgctatgagtggcctgctggatacggtgcgtaatatgggttctcaggttgctaatgctgcgaagtcggtgttgggtattcattccccgtcgagggtgtttcgtgaccaggttggccggcaggttgttgccggtttggctgagggtattactggtaatgctggtttggcgttggatgcgatgtcgggtgtggctggtcggctgcctgatgcggttgatgcccggtttggtgtgagatcgtctgtgggctcgtttaccccgtatggcaggtatcagcgtgcgagcgagaagagtgttgtggtgaatgtgaatgggcctacgtatggtgatcctaacgagtttgcgaagcggattgagcggcagcagcgtgacgctttgaacgcgttggcttacgtgtgattgggggtgtggttcatgtttcttcctgacccgtctgatcgttctggtttgactgttacctggtctatgttgccgttgattggtaatgatccggagcgtgtgcttcatttgacggattatacggggtcgtctcctgtcatgttgttgaatgattcgttgcgcggtttgggtgtgcccgaggtggagcatttttctcaaactcatgttggggtgcacggctcggagtggcgcgggtttaatgtgaagcctcgcgaggtgacgctacctgtcctggtgtcgggtgttgagccggatcctgatggcgggtttcgtgacggttttttgaaagcctatgacgcgttgtggtctgcttttcctcccggggaggagggtgaactgtcggtgaagactcctgccggtgttgagcgtgtgctgcggtgtcggtttgattctgtggatgacacttttacggttgatccggtgaacaggggttatgcgcgttatctgttgcatttgacggcttatgacccgttttggtatggggatgagcaaaagtttcgtttcagtaacgcgaagttgcaggattggctgggtggcggccctgtcggcaagaagggtacagcgtttcctgtggtgttgacgcctggtgttggttctggctgggataatttgtcgaataagggtgatgtgcctgcgtggcctgtgattcgtgttgaggggcctttggagtcgtggtctgtgcagattgatggtttgcgtgtgtcttcggattggcctgtcgaggagtatgattggatcactattgatacggatcctcgtaagcagtctgctttgttgaatggttttgaggatgtgatggatcgtctgtctgagtgggagtttgcgcctatcccgcctggcggttctaagagtttgaatattgagatggttggtttgggtgccattgttgtgtcggtgcagtacaggtttttgagggcttggtgaatagttgatggctggtcttgttccgcatgtaacattgtttacgccggattatcgccgtgtggcgcctatcaatttttttgagtcgttgaagttgtcgttgaagtggaatggtttgtccactttggagttggtggtgtctggggatcattctaggcttgacgtgttgactaggccgggtgcacggctggttgttgattatggtggtggccagattttttctgggcctgtgcgtaaggttcatggtgtgggtccttggcgttcttcgcgggtgacgatcacgtgtgaggatgatattcgcctgttgtggcgtatgttgatgtggcctgtgaattatcgtcctggtatggttggtatggagtggcgtgccgacagggattatgcccactattctggtgctgcggagtcggttgctaagcaggtgttgggggataatgcttggcgttttccgcctggtttgtttatgaacgatgatgagagtcgtggccgctatattaaggattttcaggtgcggttccacttgttttccgataaactgttgccggtgttgtcgtgggctcggatgactgtcacggtgaaccagtttgagaatgcgaagtttgatcagcgtggtttggtgtttgattgtgtgccggctgtgacccggaaacatgtgttgactgccgagtctggttcgattgtgtcgtgggagtatgtgcgtgacgcccctaaggctacgtctgtggtggttggtggccgcggcgagggcaaagacaggctgttttgtgaggatgttgattcgatggccgaggatgactggtttgatcgtgtcgaggtgtttaaggatgcccgtaacacggattctgaacatgtgcatcttattgatgaggctgagcaggtgttgtccgagttgggggctacgtcggggtttaagatcgagttggcggagtcggatgtgttgcggtttgggccaggcaatctgatgcctggggatttgatctatgtggatgtaggctcgggccctatcgcggagattgttcggcagattgatgtggagtgtgattcgccgggtgatggttggacgaaggtgacacctgttgcgggggattatgaggataatccgtcggcgttgttggctcgccgtgtggctggtttggctgcgggtgtgcgggatttgcaaaaattctaattgttaggggtttgttgtgggtattgtgtgtaaagggtttgatggtgtgttgaccgagtatgattgggctcaaatgtcgggtctgatgggtaatatgccgtccgtgaaagggccggacgattttcgtgtcggcacgacgattcagggtgccacagtgttgtgtgaggtcctgccggggcaggcttgggctcatggggtgatgtgcacgtcgaatagtgttgagacggtgacagggcagctgcctggccctggtgagacccggtacgactatgttgttctgtcgcgggattgggagcagaacacagccaagttggagattgttcccggtgggcgtgcggagcgtgcccgtgacgtgttgcgtgccgagcctggcgtgtaccatcagcagctactggctactttggtgttgtcgtctaacgggttgcagcagcagcttgacaggcgtgctatagcggcccgtgtggcgtttggggagtctgctgcgtgtgacccgacccctgtggagggtgaccgggtgatggttccttcgggggctgtgtgggctaaccatgccggcgagtggatgttgttgtctccgcgtatcgaaacgggttctaagtcgatcatgtttggtggttctgctgtgtatgcttacacgattccgtttgatcgccagttcagtagtccgcctgttgtggtggcgtctatggctacggcggctgggggcacgcagcagatcgatgtgaaagcctacaatgtgactgcccaaaattttagtttggcgtttattacgaatgatggttcgaagccgaatggtgtgcctgcggtggctaattggattgctgtcggcgtgtgactgtacaggtgttgtggcggatggtgtgatattggggggctgtggtgtcgtggtttactcctgcactggtggcctctatttgtaccgcgttggccacggttttgggttctgttcaggcggtcacatcccgttctaggcggcgtttacgcaggctgtctgcgcaggtggatgctttggaggagtatgcgtggggtgtgcggcgtgaggttcgccggtttaactcgcggcttcctgacgaggtggagcctatgcgtcttcctgatgtgcccgagtttttgaaggatactgttgatggtggtggggggtgaattgtgagggagttggaggaggagaagcggcagcgccgctcgtttgagaaggcttcacttatattgttgttcttgtcgcttgtgttgttggcggtggttgctgcgggtgctttacgtttcggggctgtatcctctgagcgggattcggagcaggctaaagcccagtctaatggtacagccgctaaaggtttagccagccgtgtgaagcaggtgtgtacccagggtggcgtggagtctgcgcggcttcaccagtctggcttgtgtgtggatgctcagcgtgttgagcgtagcgtgcagggtgttcctggcccggctggtgagcgcggcgaggtgggcccttcgggtcctgccggcccgcaaggcgcacagggggagcgtggtgagcgtggccccgcaggtgtgaacggatccgacggtaaagacggtaaggatggcgctgatggccgtgatgggcgttcggtgatatcggtgtactgttccgggggccgcctggttgtgaaatatagtgacggtacggcctctaccgtgtcgggttctgtggcttgtgagagtgtgaaaccgtcacctgtggttaccgtatcatcccataggtgaacaagaagagggaagggtgttactagtgttgattgtggtgtttgggggtggtgtgtggtgagatacattccagcggcgcatcactctgccggttcgaatagtccggtgaacagggttgtgattcatgcaacatgcccggatgttgggtttccgtccgcctcccgtaagggtcgggcagtgtccacggcaaactattttgcttccccatcatcgggtggttcggcgcattatgtgtgtgatattggggagactgtgcaatgcctgtccgagtctacgattggttggcatgccccgccgaatccgcattctttgggtatagagatttgtgcggatgggggttcgcacgcctcgttccgtgtgccaggacatgcttacactcgtgagcagtggcttgatccgcaggtgtggcccgcggtggagagggcggcggtgctgtgccggcagttgtgtgacaagcatggtgttccgaaaaggaaactgtcggctgccgatttgaaggccggtaaacgtggtgtttgcgggcatgtggatgttacggatgcgtggcatcagtcggatcatgatgatccggggccgtggtttccgtgggacaaatttatggctgtggtgaatggccacggcggcggttcaagtagtgaggagttgagtatggctgatgtacaagcgttacataatcagattaaacagttgtcggcacaggtggcccagtcggtgaataagctgcatcacgatgttggtgtggttcaggtacagaatggtgatttgggtaaacgtgttgatgccctgtcgtgggtgaagaatccggtgacggggaagctgtggcgcaccaaggatgctttgtggagtgtctggtattacgtgctggagtgtcgcagccgcatagacaggctcgagtctgctgtcaacgatttgaaaaagtgatggtggtttgttgtgggtaaacagttttggttaggtgtgctggagcgggcgttaaagacttttgttcaaacgtttgtggctgtgttgggggtgacggcgggtgtcacgtatactgcggagtcgtttcgcggtttgccatgggagtctgccctgattacggccacggttgctgcggtcctgtcggtggctacctcgtttggtagcccgtcgtttgtggccggcaaacctaaaaccatggttgtggatgctgggcttgttccacccgacgatgggggcatggttgagccgcactcggtggatgtgtcggatcctggcatgatcgagcctgcagatgatgtggatcttggtgtaggctatgagcctcggcgtgcagccgagtcggaggttggcacagtagagtctactgttgcataagtgaatatagatgtgtgccccagcggtgctgccacgattgtgtggtggttgccgctggggcactatttttgtatattgcggtgtggctatgattcgttgctgtcgatggtgtcttcgagcatctgatacaggtggaggcaggtagagatcgtttcgctggcctggtcgagaacgttccggccgataacgtttttgtggttgtcgcggtggcggatgatagcccacatgatctcgtcggctgccgcctgtaatagtttggcctggtatgcgattccggcgagccagtctagtgcttcctggcttgcataggggctctggttctcgctgttgccgcgggtgttgctgttgtttgtggggtgtcctgcactgtcgcagaaccataggatttcgctgcactcgtctagcgtgtcttggtcgatagcgagatcgtcgaggctgacattgttgacggtaaggttcacgttgtcgagggagatgggtacaccgtactggttttcgacactgtcaacaatgttttgtagttgttgcatgttggtgggctgttgttggacgatgcggtgtatcgctgtgttgagggtggtgtaggtgatgttgtgtgtgttgtccatcgtgttatgccattccttcgttatcgtctggcatgtagtatgtgctgtttgcgtactcggttaacgtcatcagtgtttggtctgcccactgtttcacggtttgccgggtgacacctaatcgttgggcggctgtggcgtaggtttggtcgtatccgtagacttcccggaatgctgccagcctagctaaatgttttcgctgtttggatggttcacaggtgagtgtgtagtcgtcgatagcgagctgtagatcgatcatggtgacgatgttgttgccgtgatgctggggggcggttggtgggggtggcattcctggttcgacggatggtttccatggtccgccgttccagatccattgggcggcttggatgatgtcggcggtggtgtaggttcggctcacttggtcaccccctgaacatgttgtcgaggttgttggtgttgctggtgtcgaatcgtccgacgcagtggcagtagtcgtacatgagtttgatgatgtgttggtggtcgccgaggtaggtgtttccgctgatgctgtaggtggctgtgccgtctttgctgatggtgtatttggcggtgatggtttcgggtgtttctgtgttggtgatgatggctgtggtggtggcgcctacggtttgtagcctggtggtttgggttccgtcgtcgaggatggttgtgaccatggtgtgtgttctccttttaaatgctggtttggttgtcggctatggacgtgatttcgtgtaccggtttgggtaggtctaggtgttgtatggttttgttggctagccgtttggctaccctgtaacacattttggtgtagtgtttgttgtctaggttgtggtattgttcccgcaccgcaatatatagtagggagtcttggtacaggtcgtctgcactgattgcggggtagtgtccggctgttttggtgcatgcccggttgagtgtgcgtagatgatggtttgtggcccatccccacgatgcggtggtggccaggtctgcttttgttggtcgtctgctcatagcatctcttttatctggctatctgatagttgtttggtgttttgttgtggatagtgtagcacactagtccggggtggccggtggtgcctgtacggtgccggaaccatgtggattcgccttccatggatgggcattggatgaaggtgcgttgtccttgctcggatatttctaggtggtgtcggtggcctgccatgagtatgtgtgatgtggtgccgttgtggaattcttggccgcgccaccattcgtattgtttgccggtgcgccattggtgcccgtgggcgtgcaggatttgtgtgcctgccacgtctacggtggtggtcatttcgtctcggctggggaagtggaagtgtaggttggggtattggttgttgagctggtaggcttctgcgatggcgcggcagcagtctacgtcgaatgagtcgtcgtaggtggtgactcctttgccgaatcgtacggcttctccgtggttgcctgggatggatgtgatggtgacgttggcgcagtggtcgaacatgtggacgagttgcatcatggccatgcgggtgagcctgatttgttcggtgaggggtgtttgtgtgcgccaggcgttgttgccgccttgtgacacgtatccttcgatcatgtcgccgaggaatgcgatgtggactcgttgcggtttgcctgcttgctgccagtagtgttttgcgactatgagggagtgtaaatagttgtcggcgaagtgtgctgtttctcctccggggatgcctttgccgatttggaagtctcctgccccgatgacgaaggctgcagtgctgtagtcggtgtgggtgttctgttcgggtttggggggtgtccattcggctagtttgttgacgagttcgtctaccgggtaggggtttgttgcgggttggtggtcgatgattttttgtatggatcggcctgtttctccgttggggagtgtccattcggagatgcgtgtgcggcgtacagtaccattggctagattgtcgtcgatggtgtcgatggcgttgtcgtggttggctagctgtgtgagtagccggtctatattgtctatcactggttttcctcttctgttgtctgggtggtgttggcttgtttgcggcgatagtctttgatgacggtggcggagatggggtatcctgcctgggtgagctgttttgctagccatgaggcggggatagacctgtcggcgaggacgtctgcagctttgttgccgtagcgttggatgagggtttcagttttggttgccatgatgtcctatcggttgtgtggtgggttgccatcctgtgcggcagtcgccgtcgtgtcctggcttgcgtgtgcaccacgatacggttccgtctgtgtggttgagtgtttttccgcacatgacgttttgtagatgttccggcagctggtcggtgttgctatcgtcttgctcgtctagcaaagttttttgttgggtgaaaaactcggacacggtgccgttgtggactggtagtatccatgttttccattgttgttgtagccgagtgttccagtggaattgtttggccgcgttttcggcttgtttgatggttttgtagtagcctacaatgatccgctggtggttgttgtctggcttgtgtggccctttccagtattgggcggctacagcgtacctgttgttgtcggtgaagcgctgccagcagtactcgatgatgtgctgtagtacactatcgggaatgtcttgtgcttggttttcgtcgagccactcgtcgacaataatgttgcgtatggctcgcttgtctttggtggtgggtttgaacgagatgctcacagtacgggcctgtcgtcttgcatgaactggttgaaggtgctgttcccggcgtgttgggcttgtgtgatttgctggtcggtccagtctgggtgttgctgtttcagatagtgccagtggcaggcgttgtaggtttcgttttgtagccgtgtgagatggttttcggtgatgatttgtttccacattttccacgagacgtcgagtcgtttgagcatgtcgatggccggcacattaaacgagtcaaggaagagtatttcgtgggtgtagtagtttttctcgtaggcgtcccatccgcttcggtgcctgttgggctggtttttggggtagacttcccggcatactttgtgtaaccgtttggccatgtctttgggtagtttaatgtcggggttggcgcggatcatggatcgcatcccatcgtaggtggtgccccaggtgtgcatgatgtgtagtgggtcttcaccatcagcccatttttctgcacagatggcgaggcggatacgcctcctggctgtttggctggtgttgcggcggtgggggatggggcacgtgtcgaggggatccatgatgttttggtgtacctttcttggtttgggttgcttgcgtggttttactgtagcacagtgtctagtgcttgtgtcaaccctgtttttccggcctgtaggtaggtgtctgtgacgtcaccgagggtgaggggcacatgggtggcttgggggagtgccgcctggagggtttgggccatctggtctcctgctttgtctgggtcggaccatatgtagatgtggtcgtagccttcaaaaaatttggtccaaaagttttgccacgaggtggctccgggtagggcgacggccgaccatccgcattgttcgaggatcatggagtcgaattcgccttcgcagatgtgtatttcggctgccgggttggccatggcggccatgttgtagatggagcctgtgtccccggctggggttaggtatttggggtggttgtgggttttgcagtcgtgcgggagtgagcagcggaaacgcatttttcgtatttcggctgggccgccccaaacggggtacatgtatgggatggtgatgcactggttgtagttttcgtggccgggtatggggtcattgtcgatgtatccaaggtggtggtagcgggctgtttcttcgctgatgcctcttgctgagagcaggtcgagtatgttttcgaggtgggtttcgtagagggccgaggctttctggattcggcggcgttccgcaatgttgtatgggcgtatgctgtcgtacattcgggttttcttcttctaatcgttgttgtagtttggtgagtccgcctccgacaccgcatgtgtggcagtaccagacgcccttgtcgaggttgatgctcatggagggctggtggtcgtcgtggaacgggcagaggatgtgttgctcgtttttggacgggttgtagcggatgcggtaggtgtcgaggaggtggcaggtgtcagaggtgtgggaggagctcgttgagggttgataccacataggcttcgctccagggtttgttgcgctgtttcatgatgactaggccgatggtggattggtttttgcggtttcggtgggtttcgtagttgcgcgcctcaagggtggcttctttcacgaattgggctaggtgtggttgcccggctttcgcctcgataatgtaggttttgttgccggttttgaggatgaggtcgccttcgtcttcccttccgttgaggtggaggcgctctatatcatagccggtgtcgcgtagttggtggaggagtcttgtttcccattcggctccggccctgcggttgcgtgattgttgtgtcgccatcatagtcctttgtgtgttgtggtcatgttccagggctgtttttcgacgaggggtccgaagaatgtgtattcggggtaggctcgtagccgctcatattttgttccgtctgggctggatcgcccggtgcgctgtttgagcacggcgatgcgagcctctgccggtatcgataggccgttgccattatcctcgccaccatacaatgatactccgagaatgagttgtggtttttcggagagtccgtttttgatttcccggcgtgctggcgggtgttcgatgtcggagccggttttgtcggttgcgtggtgtgtgacaataatggtggagccggtgtctctgcctagtgctgtgatccattgcatggcttcttgttgggcttggtagtcggattcgcagtcttggatgtccatcaggttgtcgataacaatgagtggtgggaaggtgttccacatttccatgtaggcttgtagttccatggtgatgtcggtccaggtgatgggtgactggaatgagaatgtgatgtgttggccgtggtggatgctgtctcgatagtattctggcccgtagtcgtcgatgttttgttgtatttgggcggtggtgtgttgggtgttgagggagatgattcgtgtggaggcctcccagggtgtcatgtcccctgatatgtagagggctggctggttgagcatggcggtgatgaacatggctagcccggatttttggctgccggagcgccccgcgatcatgactaggtcccctttgtggatgtgcatgtcctggttgcggtagaggggttctagctggggtatgcggggcagctcggcggcggtttgggaggctctctcgaaggatcgttgtagagagagcatcggagccttaatctatctgtctatcggttggatgatgtgttggtggtcagatggagtcgatgtcgatatcagcatcagttgaggctgtggtgtcgtctagctggctgttatcgcgtttgtctacgtattcggcaaccttatcatagatggcatcatcaaggggtttgagcacgaccgcgttgaacccgtttttggtgcgcacggtggcgagtttgaaggcctgttcttcgccgagatatgcttctaggtcgcggatcatggagtgtgggcggtcgttgttgccgcgtgctttctcaataatagcgttggggatggtttctggggtgccgttgttgagatcgtctagggtgtggaagattgtgacatcggcgtagatgcggtctgcgacctgtccgccgtagccttcggtgttgtgttctacgtcgcggattttgaaggcgatggcggtggcgtcctggtttcgggaggggttgaagaaggtgctgttgctgttgtggttgcggtagttggcgagtcccatgattgttgtttcctttactgttgtgtctgtttttgttgtcttatattggtttatcgggtgaggctgtttcgtttgctgcggaacgcctcggacacgtcagggttgctggtgatggtctttttgtactgtttgaggaggtcggctagctgtgctttgctggtggctttgttgatccggtcaatgatgatgtcgttttcctgattggcgattttgtttacgtagtctttggcggcctgattgtatcggtcttggaggatgatggatgcgctcgctacgagtgttgcaaggtcccagtctttcgatacggtttcgtctttcaatcctcctagcaggtcgatgatagttttctttacctggtcggcggtgtctccgcggatgacggtccatggggcggcgtagtcgcctccgtatttgagggtgacggtgaatcggtcgtcgtctgcgttgtcggtcactggtgctccttgccttcttctgttggggctgtgatggtggtttctaccgggtacctgtaggcgtctttcccgttgacagcccagcaggcgtccttgacggggcagcctttgcagagtgctgtgacgtgtgggacgaagatgccttcgctgattcctttcattgcttgactatacatggatgatacatgccggtaggtgttgttgtcaaggtcatagagttcggtggatgtgccttgtgtcggggacttgtcgtcgttgcggctggtggctggcgtccaaaaaatgccttttgtcacattgttgccgtgttggttgagcatgtaccggtatgtgtgcaactgcatactgtcggcgggtaggcgtccggttttgaggtcgaggatgaaggtttcgccggtgtcggtgtcggtgaagatacggtcaatatatccgacaatagtggtgccatcctggagggtggtttctaccgggtattcgatgcctggctggccgtcaataacagcggtgatgtattctgggtggttgcgcctccagtttttccacctgtccacaaaggtggggccgtatatcatccaccaattgtagtcttttttgtgtggcccgcccgactcgcacatgtttttgcacaccctgccggagggtttgatttctgtgccttcggattcggcgagggcgacttgggtgtcgaaaatgtttttgaaggatgagagtttgtctggcagtgcagggtattcggcgggattgtacaggtgtaggtcgtattgttcggtgatgtggtgtatggcgcttccggcgatggtggcataccaggtgtggtgttgggcgtggtagccgtgttggaggcgccatttttctccgcattcggcccactgggtgagtgaactgtaggagatgtggcctggatggtggatggttttcgggtattgtgctaggggcattacttgtcgcttttgttccatgggttgcgggtgtcttggccggcctggtgttgctggtaggcgaggagtgctaggcagtgccaggcagcatgggccaggtggggtagcccggattcatcatcgaggttgtttccttgctgccatgataacaggtgccggtagagggcgtcgacactgtggctccacgggtagccgccggtccagttgttgtcgccgtatttggtggcaccgtagcctgccacggagccgagggcgtgcaaggctgcggggtcgatgagggagagcctgcaaagtttgagttcttttttggcaccggtgttggggtcggtgtacatgctggttggttcatccatggtgtgtgtgctccttgagtgtgggttactggttggggttgtgggctagggctacggcgaggatgatgatggcgagggtttcagcaataagtatgggtgttgtgatcatttagtgtctcggggattgttggtgagtgtggaggcgcctaggagggtggtgagggcgcatgcggcaataatggcgagggctgccttgtgtggggtgccggttgcgtacatccatgtgatgatggcgccctgtatccatgccagtgtggtgaagaacgtttcgtagctgtgtagctcaatgttgttgggtgtgttcatgcttgctcctgaagaatggtgttgatggttttataaatgttgtacaggttggtttcgatagataacagttggtggatttcgtggtcgagatcaatgtctgggttgagggtgttgatgcgggaggcaatatcggtggctgtgcgtagtgtgccgccggtgtggtgaatgatgtgtgccgtgtcggcgagtccggtggtgacagcgtagtgggagaggagaggcatagcggggatgctccttggcgggttactgttgcgggttgatgttgaggtctgtgacgtgcgggtggtcttctgttccggtgacgaggcagtggactgtgacgggtagtttggatgctcccggctggcggacggtggcgccgtagacgatggagaaggtgtctttaccaataattttgtggagttggaggtcgatgtcggggttgccgttccatttgacaccgtgtgcggcggcttgctgttcggctttgcggttgcaggtgtgtgctgccgtgatcatggtgagtccggtggcggtttcttcaccccttgcttgggcctgcttgtgggctttggcctgctcggctcgcagtgactgttctgcggcggcctgccgggctttcttttcggctttgcgctgttggacggttttgggggtccattcggtgttggctgtggtggcctgtggggctggctgtgaggcgagtggcggattgtcgtctggggctggcatgaatgaggcggcggcaatgatggcggctgtgatgcctgcgatggtgtagccgtttttcttgttcatgttttgtgtcccctttccggggtgttgttcgttgctgacatgattaatactttcagcggctgggccctgtgtcaaggctgcgctcagtttgtgtgagcgatacttgtgtggctaggggtgatggcttctttcgcccaataggatgtgccaccgctggtccagtatccgagtttgttgcgctgcatgcccttggcgtccatctcatccacggtgaggcacctgcggcgattggggccttccttgaccccgtgatcgcctacccgatgcatgtcgcctgaggtggtactcgtgaatgtttcgtggcagattgtgcagtgctctgacttgtatccgatgattgtgctatcgcacttgtggcatgtccattgcatgattgctcctattttccattataagactccctgtagtgccattttagcgccttgcgggtcttgggggtacaactatataggtcaggtatttctaagcgtttctaggcgattctaggctcattgtgtgcgactgaggtttatcgggcacacagggtgagcaggtggccaacattgatgcgggtcacattccagtagagttgcgtggcttcaccgccggtgagtggcttccactcatcatggctgaacacggtgccatcggtggcgatgaatgtgttggggcgtagcttgtggagttcaatctctacgctctgccggtaggcttcggcgaggcccccgaaatcgaggtggtcgcaggggaggttttcgaggcgtgtcaggtcgaagggtgtggggcagtcgtagctggcggggctgtagagctgggtgaagtggttggcgatcttctgcatcatgattccttttctggtgatggtgtgttgatggttttatcgtgtggattcggcgatgatagcgtcgaggtcgatcatgtcgatcatgtcgtggagttcctcagtctcatctggggtgagtggctgccagttgcgtggcccatacactgcaccgtcaagagtgatggtccacaggggccggatgagtcgtacggcttcttcgactttggcacggtataggcggcagatgatagacgtgtgggtgttacctatgtcacatcctgccaggtgtgcgggatggagtggattgatttctgtttgcccgtagaggctggtgaaggatggtgtgatgagtgtgccatccatgggtgatgttcctttctgggctgtctgggttggttgttgtggtttctagagtgtgtgggctgtgacctatagtcaaggctacgctcattcggattgagcgtttcatgtgggtgtggcatggaatctacacccccatactatgtgagataggccacatcctcctggcttggtgtgccatctcaaggccaccctgccaatctggcgtggagggtgtagcccagaaataccgtttaaagccttcacacggcgcctaggagcaccttacagggtgggggctaggtattcatacccccaagcaattctgatcgattctagacgcctacaggagcctcatacacgatcaaccatctcggcatagatcatcagcccctatcctgcttagctaagcctatactatgtggacagtgtgggatactgtagggggaagaaggacacggtaaaagaaagaagggggagcatcagccttcacaccttaaagtcttagcgcttagcaccgatggtcttagcagttagcaccgagcccctcaagggctcggcatcagcccgaacaggcacagccctgaaaggagtacacgccatcagggaaggcttgagagtacgaggagccctagcgacgagtactcgaaagcctgagggaacaccctcagcactgatgggcctagcgtgttcggaaaggacacaagagtcaaacgtgacagctatccgggagtgaaacccgttctgactaggggtttcagccttaaccacctgtaaaggttacaagactctaagaaaatttaaggaaaagtttaggtttaatttttggacctttactaccaaaaacacccgtttacacccctcaaacccgcctatagagccaaatccaccggtttgactcatcccaggtggggtatgataggctggacaggtagccagctggacgcaaggccagaaagtgctgacgcacttcccgacctcgcttaccatcagtctaccaaacacttaaagaccttaaggcttagcgctaagcccttaagaccttaacgcttagcaccgagccccctcaagggctcggcatcagccctaaggctttaacacttaaataaacatataaaccttaaaagctaagttaacatttaagtcttacacacttagcgctgagccctccaaggctcagcatcagtcttaggtacttaaggatctaagttactataaaagttttaaagtcttaaagtaactatataaccttaacagttaagttaactataaaaccttaaaggctaagcacttaaggttataaacttaacatcagtgtttaagacttaaagagttaaacacttaaagtaactataagactttaaaaacctcaagtcttaaagttaaccatcagtcttaaactttaatattataacctataagtcttaaagcttataagttataaaagttttagaagagctaaggggttaacttctttacttctcttctctctttggttctttctctcttctcttcttttcttcatcaggggagaagaggaaccttttgccgtcagcgctgatgggcttttcaccgtgtgactcgtgtgcttctggtcgcaagctcccatcgcgcactccccacactctgacacctgtgtccctttcaggcttggcgtgttcggctgaaggcgtacggcgtgtcatgctcacacccttaacaccgggtgagacttaaagtgtatattatatgtagaagactttaaaacctgtaaggtgttcccgctgagcccgtgtcctacaccgccaagcgctaagccttgaaacgcgaacacacacccaccccccttttttctttcgtgtccttctcttttgacacagctggggggtgatgtgatctttctcacatgtcaggggggtagtggagaaaacaaacaccccaccacaaacagaacacccctcaaacacacaaaacagggcctaggatcgatcagcagggcaagggcaaggtattcatacccccagacgattccaggccgttacaggggcaaataagacccgtacagggctaggcgaggaacagacacatcatggcacgcaccaaccgtacagccagccaagcccaccggcgctggcgggcaagactcatcacccaagcccgacagcaaggccaaaccgaatgcccactctgcggagcccagatagcctgggacacacatgacctgccaaccagccccgaagccgaccacatcacacccgtcagtaggggaggactcaacaccctcgacaacgggcaaatcatctgcagaacatgcaacagaagcaaaggcaatcgcagcgaaccaaacatcaagttccaacaacaaaccacaaaaaaccttgttccatggtgacaaacccgccaacccccaccggggacaccccctgcacacccgtgcaagacc

SEQ ID NO: 35 - DNA, 29266 bp, unidentified
  source 1..29266: mol_type = unassigned DNA; note = Bacteriophage of P. acnes
agtgaaatacctcccttttgtggatttgtctgtttgtcgattttttgtgttggtggtgagtgttgtgcagcctgagcttcctgatagtcgtgattggtgtggggagacgcgtcgttggtggcgtgtgtggggtgaggatccgcgtgccgggtttgtgtctgatgaggagtggttgtttctcatggatgctgcggtgttgcatgatgtggtgtggcgtgagggcagggcggaccttgtggcttcgctgcgtgctcatgtgaaggcgtttatgggcatgttggatcgttattcggttgatgtggcgtctggtggccgtggtgggggttctgcggtggcgatgattgaccggtataggaagcgtaggggggcctgagtaggtgtctggtgttgttgggtctcaggttcctcgtcatcgtgtggctgcggcgtattcggtgtctgctggcggtgatgctggggagttgggtcgtgcgtatgggttgacgcctgatccgtggcagcagcaggtgttggatgattggcttgctgtgggtggtaatggcaggcttgcttcgggtgtgtgtggtgtgtttgtgcctcgccagaatggcaagaatgctattttggagattgtggagttgtttaaggcgactattcagggtcgccgtattttgcatacggctcacgagttgaagtcggctcgtaaggcgtttatgcggttgaggtcgttttttgagaatgagcggcagtttcctgacttgtatcgtatggtgaagtcgattcgggcgacgaatggtcaggaggctattgtgttgcatcatccggattgtgccacgtttgagcgtaagtgtggttgtccgggttggggttcggttgagtttgtggcccgcagtcggggttctgctcgcgggtttacggttgatgatttggtgtgtgatgaggctcaggagttgtcggatgagcagttggaggctttgcttcctacggtgagtgctgccccgtctggtgatccgcagcagatttttcttggcacgccgcctgggccgttggcggacggtagcgtagtgttgcgtttgcgtgggcaggctttgtcgggtggtaaaaggtttgcgtggacggagttttcgattcctgacgagtctgatccggatgatgtgtcgcggcagtggcggaagttggcgggtgacactaatccggcgttgggtcgtcgtctgaattttgggaccgtaagtgatgagcatgagtcgatgtctgctgccgggtttgctcgggagcggcttggctggtgggatcgtggccagtcggctacgtctgttgttccggcggataagtgggctcagtctgctgtggatgaggcgagtctggttggcgggaaagtgtttggtgtctcgttttctcgttctggggatcgggttgctttggcgggtgccggccggactgatgctggggttcatgttgaggttattgatgggctgtcgggaacgattgttgatggtgtgggccggttggctgactggttggcggttcgttggggtgatactgaccggatcatggttgccgggtctggtgcggtgttgttgcagaaggcgttgacggatcgtggtattccgggccgtggcgtgatggttgccgatactggcacctatgtggaggcgtgtcaggcgtttcttgagggtgttcgttcgggtgttgtgtctcatcctcgtgctgattctcgccgtgacatgttggatattgctgtgaggtcggctgtgcagaagaagaaaggctctgcgtggggttggggttcctcgtttaaggatggttctgaggttcctttggaggctgtgtcgttggcgtttttgggggctaaacgtgttcgtcgtggctgtcgggagcgtagtggtaggaagcgggtgtctgtggtatgaacgtggacgagttggctctgattgagggcatgtacgatcgtatccaaaggttgtcttcgtggcattgccgtattgagggctactatgagggctctaatcgggtgcgtgatttgggggtggctattcctccggagttgcagcgtgtgcagacggtggtgtcgtggcctggtattgctgtggatgctttggaggagcgtctggattggcttggctggacgaatggtgacggctacggcctggatggtgtgtatgctgcgaatcggctatcaaccgcgtcatgcgacgtccaccttgatgcactaatttttgggttgtcgtttgttgcgatcattcctcatggggatgggtcggtgtctgttcgtccacagtcaccaaagaattgcacaggccggttttcggctgacgggtctcgtctggatgctggccttgtggtgcagcagacgtgtgatcctgaggttgttgaggcggagttgttgcttcctgatgtgattgttcaggtggagcggcggggttcgcgtgagtgggcggagacgggccgtatcgtgaatgtgcttggtgcggttccgttggtgccgattgtgaatcgtcgccgtacttctaggattgatggccgttcggagattacccggtcgatcagggcttacacggatgaagcggttaggactttgcttgggcagtctgtgaatcgtgacttctatgcctatccgcaaaggtgggttacgggtgtgtcggctgacgagttttcgcagcctggctgggtcctgtcgatggcttctgtgtgggctgtggataaggatgatgacggtgacactccgaatgtggggtcgtttcctgtgaattctcctacaccgtattcggatcagatgcggctgttggcgcagttgactgcgggtgaggctgcggttccggaacgctatttcgggtttatcacgtctaacccgcctagtggggaggctttggctgccgaggagtctcggcttgtgaagcgtgccgagcggcgtcagacgtcgtttggtcagggctggctgtcggttggtttcctggctgcgagggcgcttgattcgagtgttgatgaggccgcgtttttcggtgatgtgggtttgcgttggcgtgatgcttcaacacctactcgggcggctacggcggatgctgtgacgaagcttgttggtgccggtattttgcccgcggattctcggacagtgttggagatgttggggcttgatgatgtgcaggttgaggctgtgatgcggcatcgtgccgagtcttcggatccgttggcggcgctggctggggctatatcgcgtcaaactaacgaggtatgataggcgatggcttcgggtgctatgtcgaggcttgctgccaccgggtatcagcgtgaggcggtcaggtttgccgggaagtatgctgggtattatgccgagcttggtcgtttgtggcattccgggaagatgacagatgcgcagtatgtgcgtttgtgtgtggagttggagcgtgccggccatgatggttcggcgtcgttggctgccaggtttgtgcaggattttcgccggttgaatggtgtggatccgggtttgattgtgtatgacgagtttgatgctgccgccgcgttggctaggtcgttttcgactatgaagattcttaagagtgacccggatagggtgaatgacacgattgatgcgatggctgcgggtgttaatcgggctgtcatgaatgctggccgtgacacggttgagtggtcggcgggtgcgcagggtaggtcttggcgtcgggtgacggatggtgatccgtgtgctttttgtgccatgttggctacgaggtcggattatacgactaaggaaagggcgctcacgactggtcatactcggcgtcataagcgtggtggtaagcgtccgtttggttcgaagtatcatgatcattgtggttgtacggtggttgaggttgttggcccttgggaaccaaatagggctgatgccgggtatcagaggacgtacgagaaggcccgtgagtgggttgatgatcatgggttgcagcagtcgcctagcaatattttgaaggctatgcgtactgttggcggcatgagataatttgatgtggtttccggttgtgtgccgccggttatcggtgcacagggttgtctcccgcacgggggtcaacaatgttgtgttgttttccgcaaggagtgtagggttaggctatggccgatcagagtgttgaggaacagaatgttgacaatgatgctgtggagtccggaaaggataacggcattgttgatacagtaaaagacgatggcgggcaggaggtagccgacaatcagtggaagaatgaaggcgagggtaaatcgccggggactgattggaaggcggaggcccgtaagtgggagtctcgtgctaaaagtaatttcgccgagttggagaagcttcgcgcctcggatggcgatgcggggtctgtgattgatgatcttcgccgcaagaatgaggaactcgaagacaggatcaacgggtttgttcttgagggtgtgaagcgcgaggtggctgccgagtgtggcctgtcgggtgatgctgtcgcttttctgcacggtgatgatcgtgacgcactggtggagtctgctaaggctttgaagggtttgatcgaccatagtagtggtggcgcgggtgtgcgccgtcttgcggggagtgcccccgttgatgatgttaaacgacgtgagggtgtcgcgtttgtggatgctcttgtcaataattctaggagatgatttgtgatggctgacgattttctttctgcagggaagcttgagcttcctggttctatgattggtgcggttcgtgaccgtgctatcgattctggtgttttggcgaaactgtcgccggagcagccgactattttcggccctgtgaagggtgccgtgtttagtggtgttcctcgcgcgaagattgttggtgagggcgaggttaagccttccgctagcgttgatgtttctgcgtttactgctcagcctatcaaggttgtgactcagcagcgtgtttcggacgagtttatgtgggctgatgctgattaccgtctgggtgtgcttcaggatctgatttcgcctgctcttggtgcttcgattggtcgcgccgttgatctgattgctttccatggtattgatcctgctactgggaagcctgcggctgctgtcaaggtgtcgctggataagacgaatcatgttgttgatgcaaccgatagcgctacgactgatcttgttaaggcggttgggctgattgctggtgctggtttgcaggttcctaacggtgttgctttggatccggcgttctcgtttgctctgtctactgaggtgtatccgaaggggtctccgcttgccggccagcctatgtatcctgccgccgggttcgccggtttggataattggcgcggcctgaatgttggtgcttcttcgactgtttctggcgccccggagatgtcgcctgcctctggtgttaaggctattgttggtgatttctcgcgtgttcattggggtttccagcgtaacttcccgatcgagcttatcgagtatggtgacccggatcagactgggcgtgacctgaagggccataatgaggttatggttcgtgccgaggctgtgctgtatgtggctatcgagtcgcttgattcgtttgctgttgtgaaggagaaggctgccccgaagcctaatccgccggccgagaactgatttattgttgcggtgatgtgtcaatgtgcagggggtggtgttgatgggtatcattttgaagcctgaggatattgagcctttcgccgatattcctagagagaagcttgaggcgatgatcgccgatgtggaggctgtggctgtcagtgtcgccccctgtatcgctaaaccggatttcaaatacaaggatgccgctaaggctattctgcgcagggctttgctgcgctggaatgatactggcgtgtcgggtcaggtgcagtatgagtctgcgggtcctttcgctcagactacacggtctagtactcccacgaacttgttgtggccttctgagattgccgcgttgaagaagctgtgtgagggtgatggtggggctggtaaagcgttcactattacaccgaccatgaggagtagtgtgaatcattctgaggtgtgttccacggtgtggggtgatggttgctcatgcgggtctgatattaacggctacgctggccctttgtgggagatatgatatgaccagttttccttatggtgaaacggttgtgatgcttcaaccgactgttcgtgtcgatgatcttggcgacaagtttgaggattggggtcatcctgtcgagactgtgtttcataacgtggccatctatgcttccgtttcgcaggaggatgaggccgcggggcgtgactctgactatgagcattggtcgatgcttttcaagcagtctgttgtgggtgctgattatcgttgccggtggcgtatccggggtgtggtgtgggaggctgacgggtctcctatcgtgtggcatcatccgatgtctggctgggatgcgggcacgcagatcaatgtgaagcgtaagaagggctgatagattgtggctcaggatgtgaatgtgaagctgaacttgccgggtatccgtgaggtgttgaagtctcctggggtgcagtcgatgttggctgagcgtggcgagcgtgtcaagcgtgcggcctcggcgaatgtgggcggtaacgctttcgataaggcccaataccgtgcaggtttgtcgtcggaggtgcaggttcaccgtgtggaggctgtggcccgtattggcaccacctataagggtgggaagcgtattgaggcgaagcatggcacgctggctaggtcgattggggcggcgtcgtgatcgtctacgatgaccccaggaagtgggctaaacgcgtgctcaaggatgatggctggctgtctgggataccgtgtacagggacagtgccggatagctttgagggtgacctgatttggcttgcgttggatggtggcccgcagttgcatgtgcgtgagcgtgtttttttgcgggtgaatgttttctcggatacgcctgatcgtgctatgagcctgtcgaggcgtgttgaggctgtcttggctgatggtgtggacggtgaccctgtagtgttttgtaggcgttctactggccctgatttgctggttgatggtgcacgttttgatgtgtattcgctgttcgagctgatatgcaggcctgtcgaatctgagtaaacgtatttgtttttgttttaatgtaattgtttgatatttaatgggggttgtgatggctgcaacacgtaaagcgtctaatgttcgctctgctgttacgggtgatgtctatattggtgccgctcatgcgggtgatactattgatggtgtgaagacggttcctgatgggttgactgctttagggtatctgtcggatgacgggtttaagattaagcccgagcgtaaaacggatgatttgaaggcttggcagaatgcggatgttgttcgcacggtggctacggagtcgtctatcgagatttctttccagctgatcgaatccaagaaagaggttatcgagctgttttggcagtcgaaggttactgccggagccgattcgggttcgttcgatatttctccaggtgccacgacgggtgttcacgccctgttgatggatattgttgatggtgatcaggttattcgctactatttccccgaggttgagcttatcgatcgtgacgagatcaagggcaagaatggcgaagtgtacgggtatggtgtgacgttgaaggcgtatcctgcccagattaataagaagggtgatgcggtgtctggtcgggggtggatgacggctttaaaagctgatactcctccttctccgaagcctcagccggatccgaatccgccttctgagaactgatacacgattttaagggattgttgataaatgagtgacacaggttacacgttgaagattggtgaccgtagctgggtgttggcggatgcggaggagacggctcaggctgttcctgcccgcgtgtttcgccgtgccgccaggattgcccagtcgggggagtctgcggatttcgcccaggttgaggtgatgttttctatgttggaggctgccgccccggctgacgcggtggaggccctggaggggcttcctatggttcgtgttgccgagattttccgtcagtggatggaatacaagcctgacggaaagggtgcctctttgggggaatagtttggctccacggcctgattgatgattatcgtggggccatcgaatacgattttcgcactaaatttggtgtttctgtttatgatgttggtggcccgcagatgtgttggggtgaggctgtccggctggctggcgtgttgtgtactgacacgtctagccagttggcggcccacctgaatggttggcagcgcccgtttgagtggtgcgagtgggctgtactggacatgttggatcattacaggtctgctaatagtgaggggcagccggagcctgtggcgaggccgacggatgagcgtagggcccgttttacgtctgggcaggtggacgatattttggcgcgtgttcgtgccggtggcggggtgtctcgcgagattaatattatggggtgaatagtgtatgtctggtgagattgcttccgcatatgtgtcgttgtatacgaagatgcctggtttgaaggcggatgttggtaaacagctttctggggtgatgcctgcggagggtcagcgttcgggtagtctttttgctaagggcatgaagttggctttgggtggcgccgcaatgatgggcgctattagtgttgctaagaagggcctcaagtcgatttatgatgtgactattggtggcggtattgctagggcgatggctatcgatgaggctcaggctaagttgactggtttgggtcatacgtcttctgacacgtcttcgattatgaattcggctattgaggctgtgacgggtacgtcgtatgcgttgggggatgcggcgtctacggctgcggcgttgtctgcttcgggtgtgaagtctggcgggcagatgacggatgtgttgaagactgtcgccgatgtgtcttatatttcgggtaagtcgtttcaggatacgggcgctatttttacgtctgtgatggctcgcggtaagttgcagggcgatgacatgttgcagcttacgatggcgggtgttcctgtgctgtctttgcttgccaggcagacgggtaaaacgtcggctgaggtgtcgcagatggtgtcgaaggggcagattgattttgccacgtttgcggctgcgatgaagcttggtatgggtggtgctgcgcaggcgtctggtaagacgtttgagggcgctatgaagaatgttaagggcgccctgggttatcttggtgctacggctatggcgccgtttcttaacggcctgcgtcagatttttgttgcgttgaatccggttattaagtcggtgacggattctgtgaagccgatgtttgctgccgtcgatgctggtattcagcgtatgatgccgtctattttggcgtggattaatcgtatgccgggcatgatcactcgaatgaatgcacagatgcgcgccaaggtggagcagttgaagggcgtttttgcgaggctgcatttgcctgtccctaaggtgaatttgggtgccatgtttgctggcggcaccgcagtgtttggtattgttgctgtgggtgtggggaagcttgttgcggggtttgccccgttggcggtgtcgttgaagaatctgttgccgtcgtttggtgctttgaggggtgccgctggggggcttggtggcgtgtttcgcgccctgggtggccctgttggtattgtgatcggcttgtttgctgccatgtttgctacgaatgcccagttccgtgccgctgtgatgcagcttgtgggggttgttggccgggctttggggcagattatggtcgctattcagccactgttcgggattgttgctggcgtggttgccaggttggctcccgtttttggccagattatcggtatggttgctggtttggctgcccggctggtgcctgttattggtatgcttattgcccggctggttcctgttatcacccagattattggtatggtaacccaggttgctgccatgttgttgcctatgctgatgccggttattcaggctgttgttgctgtgatacggcaggttattggtgtgatcatgcagttggtgcctgttttgatgcctgtgattcaacagattttgggtgctgtcatgtctattttgccgtcgattgttggtttgatacggtcgctgataccggtgatcatgtcgattatgcgtgtggtggtgcaggttgttggtgccgtgctacaggtggtggcccgtattattccggttgttatgccgatttatgtttcggtgattggattcattgccaagatttatgctgcggttatcgtttttgaggctaaggttattggcgctattcttcgtactattacgtggattgtgaatcattcagtgtctggcgtgaggtctatgggcacggccatcctgaatggctggaatcatattagagcgtttacgtcagcgtttattaacggtttcaagtcgatcatttctggcggcgtgaacgcggttgtggggttttttgcccggcttggttcttctgttgcctcccatgtgaggtctggttttaacgcggcccgtggcgctgtttcttctgcgatgaatgctatccggagtgttgtgtcgtcggtggcgtctgctgttggcgggtttttcgggtcgatggcgtctagggttcgtagtggtgctgtgcgcgggtttaatggtgcccggagtgcggcctctagtgctatgcatgctatgggctcggctgtgtctagtggtgtgcatggtgtgctggggtttttccggaatttgcctggtaatattaggcgtgcgcttggtagtatggggtctttgttggtgtcggctggccgtgatgtggtgtctggtttgggtaatggtatcaagaatgctatgagtggcctgttggatacggtgcgtaatatgggttctcaggttgcgagtgcggcgaagtcggttttgggtattcattccccgtcgagggtgtttcgtgaccaggttggccggcaggttgttgccggtttggctgaggggatcaccgggaatgcgggtttggcgttggatgcgatgtcgggtgtggctggacggctgcctgatgcggttgatgcccggtttggtgtgcgatcgtcggtgggctcgtttaccccgtatggcaggtatcagcgtgctaagggtgagagtgttgtggtgaatgtgaatgggcctacttatggtgatcctaacgagtttgcgaagcggattgagcggcagcagcgtgacgcgttgaacgcgttggcttacgtgtgattgcggggtgtggttcatgtttattcctaacccgtctgatcgtgccggtttgacggtggattggacgatgtttccgttgattggtaatgatccggagcgtgttcttcatttgacggattatacgggtgcgtccccggtcatgttgttgaatgattcgttgcgcggtttgggtgttcccgaggtggagcatttttctcaaactcatgttggggtgcacggctcggagtggcgcgggtttaatgtgaagcctcgcgaggtgacgctgccggtgttggtgtcgggtgttggtgaggatcctgcgggcgggtttcgtgacggttttttgacagcttatgacgagttgtggtctgcgtttcctcccgggggggagggggagttgtctgtgaagactcctgccggtcgtgagcgtgtgttgaaatgccggtttgattcggctgatgacacgtttacggttgatccggtgaatcgtggctatgcgcgttatctgttgcatttgacggcttatgacccgttttggtatggggatgagcagaagtttcgttttagtaacgcgaagttgcaggattggctgggtggcggccccgtcggcaagaagggtacagcgtttcctgtggtgttgacgcctggtgttggttctggctgggataatttgtctaataagggtgatgtgcctgcgtggcctgtgattcgtgttgaggggcctttggagtcgtggtctgtgcagattgatggtttgcgcgtgtcttcggattggcctgtcgaggagtatgattggattactattgatacggatcctcgtaaacagtctgcattgttgaacgggtttgaggatgtgatggatcgtttgaccgagtgggagtttgcgcctatcccgcctggcggttcgaagagtgtgaatattgagatggttggtttgggtgccattgttgtgtcggtgcagtacaggtttttgagggcttggtgaatagttgatggctggtcttgttccgcagataacattgtttacgccggattatcaccgggtggcgcctatcaatttttttgagtcgttgaagttgtcgttgaagtggaatggtttgtcgacgctggagttggtgttgtctggggatcattctaggttggatgcgttgactaagccgggggcgcggctggttgttgattatggtggtggccagattttttctgggcctgtgcgtagggttcatggtgtgggtccgtggcgttcttcccgtgtgactatcacgtgtgaggatgatattcgcctgttgtggcgtatgttgatgtggcctgtgaattatcgtcctggtttggtgggtatggagtggcatgccgacagggattatgcccattattcgggtgcggcggagtcggtggctaagcaggtgttgggggataatgcttggcgttttccgcctggtttgtttatgaacgatgatgagagtcgtggccgctatattaaggattttcaggtgcggttccacttgtttgccgataagttgttgccggtgttgtcgtgggctaggatgactgtcacggtgaaccagtttgagaataaggtgaaggatcagcggggtttggtgtttgattgtgtgcctgctgtgacccggaagcatgtgttgactgccgagtctggttcgattgtgtcgtgggagtatgtgcgtgacgccccgaaggctacttcggtggtggttggtggccgcggcgagggcaaggatcggctgttttgtgaggattttgacgcgttggccgaggacgagtggtttgatcatgtcgaggtgtttaaggatgcccgtaacacggattctgagcatgtgcatctcattgatgaggctgagcaggtgctgtccgagttaggggccacgtcggggtttaagatcgagttggctgagtcggatgtgttgcggtttgggccaggcaatctgatgccgggtgatttgatctatgtggatgtgggttctgggcctattgcggagattgtgcggcagattgatgtggagtgtgtatcgcctggtgatggttggacgaaggtgacaccggttgcgggggattatgaggataatccgtcggccctgttggctcgccgtgtggctggtttggctgcgggtgtgcgggatttgcaaaagttttagtaagtgattggggtttgttgtgggtattgtgtgtaacgggtttgatggtgtgttgaccgagtatgattgggctcaaatgtctggtctgatgggtaatatgccgtcggttaagggcccggacgattttcgtgtcggcacgacgattcagggtgccacagtgttgtgtgaggtttcgccggggcaggcttgggctcacggggtgatgtgcacgtcgaatagtgttgagacggtgacggggcagcttccgggcccgggggagacccgttatgactatgtggtgttgtctcgggattgggagcagaacacggccaggttggagattgttcagggtggccgtgcggagcgtgccagggatgtgttgcgtgccgagcctggcgtgtaccatcagcaactgttggctactttggtgttgtcgtctaacgggttgcagcagcagttggataggcgtgctgttgcggctagggttgcgtttggggagtctgctgcgtgtgatcctacccctgtggagggtgaccgtgtgatggtgccttcgggggctgtgtgggctaaccatgccggcgagtggatgctgttgtccccgcgtatcgaaacgggttctaagtcgatcatgtttggcgggtctgccgtgtatgcttacacgatcccgtttgagcggccgtttagcgctccgccggttgtggtggcgtctatggctacggcggctgggggtacgcagcagattgatgtgaaagcctacaatattactaataaggattttagtttagcgtttattacgaatgatggttctaagccgaatggtgtgcctgcggttgcgaattggattgctgtgggcgtgtgaccgggctgttgttgtggcggatggtgtgatgttggggggctgtggtgtcgtggtttactcctgcactggtggcctctatttgtaccgcattggccacgattttgggttctgttcaggcggttacttacaggtcgaagaagaggcttaggcagttgtctgcgcaggttgatgcgatggaagaatacacgtggaatattcgccatattgttcaccgctataacgcgaatctgccggagaatgttgagccggtaaagatgcctgatttgcccgagtttttgaaggatactgttgatggtggtggggggtgaattgtgagggagttggaggaggagaagcggcagcgccgctcgtttgagaaggcttccctgatactgctgttcctgtcgcttgtactactagcggtggttgctgggggtgctttgcggtacgggtctgtggcttcccaaagggattcggagcaggctaaagcccagtcgaatggtacagccgccaagggtttggctgcccgtgtgaagcgggtgtgtgcctctggcgggcaggagtcggtgcggcttcaccagtctggcttgtgtgtggatgctcagcgtgttgagcgtagcgtgcagggtgtgcctggccctgccggtgagcgtggcccgcaaggcccgcaggggccgcaggggccggctggtgttgatggttcggctgggctggttggccctgttggtccgcagggttccccgggtttgaatggtgtgaaaggtcctgacgggttgcctggcgctaacggttcggatggccatgatggtgttgctggccgtgcaggtgtcgccggtgtgaacggatccgatggcaaggatggtcgggatggttcggctggtgagcgcggtgatgtgggcccttcaggtcctgccggcccgcaaggtgcacagggtgaacggggtgagcgcggccccgccggtgtgaacggatccgatggcaaggatggtaaagatggtaaggatgggcgctcggtggtgtctgtgtactgttctggggggcgcctgtttgtgaaatatagtgacggtgcggcttctaccgtgtcgggttcggtggcttgtgagagtgtgaaaccatcacctgtggttaccgtgtcatcccgcaagtaaaaaaagaaaagggaagggtgttactagtgttggtcgtgtttgggggtggtgtgtggtgagatacattccagcggcgcatcactcggccggttcgaatagtccggtgaatagggttgtgattcatgcgacatgcccggatgtggggtttccgtccgcttcgcgcaaggggcgggcggtgtctacagcaaactattttgcttccccatcgtcggggggttcggcgcattatgtgtgcgatattggggagacggtgcagtgcttgtcggagtctacgattgggtggcatgccccgccgaatccgcatagtttgggtatcgagatttgcgcggatgggggttcgcacgcctcgtttagggtgccaggccatgcttacactcgggagcagtggcttgatccgcgggtgtggcctgcggtggagaaggctgccatcctgtgtagacgtttgtgtgacaaatataatgttccgaaaaggaagcttagtgcagccgatttgaaggccggtaaacgtggtgtttgcgggcatgtggatgttacggatgcgtggcatcagtcggatcatgacgatcctgggccgtggtttccgtgggacaggtttatggccgtagtctgcggcggtagtagtagtgatagtggggagttaactgtggctgatgtgaaagccttgcatgatcagattaaacaattgtctgctcagcttagtggttcggtgaataagctgcaccatgatgtgggtgtggttcaggttcagaatggtgacctggcgcgccgtgtggaggccttgtcgtgggtgaagaatccggtgacggggaagctgtggcgcaccaaggatgctttgtggagtgtctggtattacgtgctggagtgtcgcagccgtatagacaggcttgagtctgctgtcaatggtttgaaaaagtgatggtggtttgttgtgggtaaacagttttggttgggcttgtttgagcgtgccctgaaaacttttattcaaacgtttgttgctgtgcttggggtgacggcgggtgtcacgtatactgcggagtcgtttcgcggtttgccgtgggagtctgccctgattacagccggggtggcggcaatactgtcggttgctacatcgtttggtaatccgtcgtttgtggccggtaaacctaaaaccacggttgtggatgctgggcttgttccatccgatgatgggggcatggttgagccgcatatggtggacgtaacggatcctggcatgatagagcctatcgacgatgccgatgctggaggctatgtgccgaggcgtgcagccgaggctgaggttggcacggtagagtctactgttgcataattgaatatgtgtgtgtgccccagcggtgctgccacgatcgtgtggtggttgccgctggggcactatttctgtttatgcggtgtggctatgattcgtttctgtcgatggtgtcttcgagcatctgatacaggtggaggcaggtagagatagtttcgctggcctggtctagaacgttccggccgataacgtttttgtggttgtcgcggtggcggatgatagcccacatgatctcgtcggctgccgcctgcaatagttttgcctggtatgcgattccggcgagccagtctagtgcttcctggcttgcataggggctatggtcctcgctgttgccacgggtgttgctgttgtttgtggggtgtcctgcactgtcgcataaccacaggatttcgctgcactcgtctagcgtgtcctggtcgatagcaagatcgtcgaggctgacttcgttgacggtaaggttcacgttgtcgagggagatgggtacaccgtactggttttcgacactgtcaacaatgtttttcagctgttgcatgttggtgggctgttgttggacgatgcggtgtatcgctgtgttgagggtggtgtaggtgatattgtgtgtgttgttcatcgtgttatgccattccttcgttatcgtctggcatgtagtatcgactgtttgcgtactcggttaacgtcatcagtgtttggtctgcccactgtttcacagtctgccgggtcacacccaatcgttgggcggccgacgcataggtttgatcatacccgtagacttccctgaatgcggcaagccgtgctagccgtttccgctgtttggatggttcacatgtgagggtgtagtcgtcgatggccagttgtagatcgatcatggtgacgatgttgttgccgtggtgttgtggcgcggttggtgggggtggcatgcccggctctacactcggtttccatgggccgcagttccagatccattgggcggcttggatgatgtcggcggtggtgtaggtttggttcactggtcaccccttgaataggttgtcgaggttgtctgggttgctggtgttggtggtgtcgaatcgtccgacgcagtggcagtagtcgtacatgagtttgataatgtgttggtggtcgccgaggtaggtgtttccgctgatgctgtaggtggctgtgccgtctttgctgatggtgtatttggcggtgatggtttcgggtgtttcggtgttggtgatgatggcggtggtggtggagcctactgtttgtagcctggtggtttgggttccgtcgtcgaggatggtagtaaccatgagggttgtcctttagatgctggtttggttgtcggctagatgaataatatcggataaaggtttcggctggtctaggtgttgtatggttttgttggctagccgtttggctaccctgtaacacattttggtgtagtgtttgttgtctaggttgtggtattgttcccgcaccgcaatatatagtagggagtcttggtacaggtcgtctgcactgattgcggggtagtgtccggctgttttggtgcatgcccggttgagtgtgcggagatgatggtctgtggcccatccccacgatgcggtggtggccaggtcggcttttgttggtcgtctgctcatagcatctcttttatctggctatctggtagttgtttggtgttttattatgtatagtgtagcacacgagtccggggttgccggtggcgcctgtgcggtgtcggtaccagactgattctccttccattgatgggcattggatgaaggtgcgttgtccttgctcggagatttcgaggtggtgtcggtgtcctgccatgagtatgtgtgatgtggttccgttgtggaattcttggccgcgccaccattcgtagtgttggttgttgcgccattggtgcccgtgggcgtgcaggatggtagccccggctacgtttacggtggtggtcatttcgtcccgctgggggaagtggaagtggaggttggggtagttgttggtgagttggtaggcttctgcgatggcgcggcagcagtccacgtcgaaggagtcgtcgtaggtggtgactcctttgccgaatcgtacggcttctccgtggttgccggggatggatgtgatggtgacgttggcgcagtggtcgaattggtgtatgagttgcatcatggccatgcgggtgagtctgatttgttccgtcaagggtgtttgggtgcgccaggcgttgttgcctccttgtgacacgtatccttcgatcatgtcgccgaggaatgcgatgtggactctttgcggctgcccggcttgctgccagtagtgtttggtggctgccagtgagcgcaggtagtcgtcggcgaagtgtgctgtttctcctccggggatgcctttgccgatttggaagtcgcctgccccgatgacgaaggctgtctcgtcactgctttgggtgtcttgttcgggtttgggtggctgccattcggctagtttatcgacgagttcgtcgaccgggtaggggtcggttgcgggttggtggtcgatgattttttgtatggatcggcctgtttctccgttcggtaaggtccattcggagatgcgtgtgcgccgcacggttccgttggctagatcatcattaatggtgtcgatggcgttgtcgtggttggctagctgtgtgaggagccggtcaatattgtctatcactggttttcctcctccttctgggtgttggtttgtttgcggcgatagtctttaataacggtggcggagatggggtatcctgcctgggtgagcatttgggctagctgtgtggcgggtatagacctgtcggcgagcacgtcggctgctttgttgccgtagcgttgaataagggtttcagttttggttgccatggtgtcctatcggttgtgtggtgggctgccatcctgtgcggcagtcgccgtcgtgtcctggtttgcgtgtgcaccacgatgttgttccgtctgtgtggttgagtgttttgccgcacatgacgttttgtagatgctccggcagctcgctattgctatcgtcttgctcgtctagcaaagttttttgttgggtgaaaaactcggacacggtgccgttgtggactgggagtatccatgttttccattgttgttgcatccgggtgttccagtggaattgtttggcggcgttttctgcctgttttatggttttgtagtagccgacgagtatgcgctggtgcggctggtcgggcgggttttggcctcgccagtattgtgctgcgacggcgtaacggttgttttctgtgaaggtgttccagcagtattcgataatgttgttgagtgtgtcgtctgtaacatctatgtcgctgtttagtgtttcttgggcgatgatgtcgcggatggcttgccgatttttggtggtgggtttgaaggtgatgctcacgatagtaccggctcgtcttgcaggaactggttgaaggagccgtctccagcatgttgtgcctgtgtgatgtcctggtcggtccagtcggggtgctgctgtttcagatagtgccagtggcacgcattgtatgtttcgttttgtagccgtgtgagatggttttcttcgatgatttgtttccacatggtccatgacacgtcgagccggttgaggatttcgagggctgggatgttgaattggttgaggaacaggatttcgtgggtgtagtattccttctcgtattggtcccatccgcttcggtgcctgttgggctggtttttggggtaggcttcccggcatactttgtgcaaatgtttggccatgtcgtcgggtagtttaatgtcggggttggcgcggatcatggatcgcatcccatcataggtggtgccccaggtgtgcatgatatgtagtgggttttctccatcagcccatttttctgcacagatggcgaggcggatacgcctcctagtggccttactcgtgtcgcggcggccggggatggggcacgtgtcgaggggatccatgatgctttttatgcctttctttgttgggggttgcttgtgtggttttactgtagcacagtgtcgagtgcttgtgtcaaccctgtttttccggcctgcagataggtgtctgtgacatcccccagggtgaggggcacatgggtggcttgggggagtgctgcctggatggtttgtgccatctgttcgcctgccgggtctgggtctgaccagatgtagatgtggtcgtagccttcgaagaattttgtccaaaagttttgccacgaggttgcgccgggtagggcgacggcgggccatccgcattgttcgaggatcatggagtcgaattcgccttcgcaaatgtgcatttcggctgccgggttggccatggcggccatgttgtatatggagcctgtgtcccctgccggtgtcaaatatttggggtggttgtgggttttgcagtcgtgtgggagtgagcagcggaaacgcatttttcgtatttcggctggcttgccccaaacggggtacatgtaggggatggtgatgcactggttgtagttttcgtggcctgggatggggtcattgtcgatgtatccaaggtggtggtagcgggctgtttcttcgctgatgcctcttgccgagagcaggtcgagtatgttttcgaggtgggtttcgtagcggactgaggctttctggattcggcggcgctccgcaatattgtatgggcgtatgctgtcgtacattcgggtttctttcttctaatcgttgttgtagctgggcgagtccgcctccgacaccgcatgtgtggcagtaccagacgcccttgtcgaggttgatgctcatggagggctggtggtcgtcatggaacgggcagaggatgtgttgctcgtttcgtgacggattgtagcgtatccggtaggtgtcgaggaggcggcaggtgtcagaggtgtgggaggagctcgttgagggttgataccacataggcttcgctccagggtttgttgcgctgtttcatgatgacgagtccgatggtggactggttttcgcggtttcggtgggtttcgtagttgcgtgcctcccggctggcttgtttcacgaattgggcgaggtgtggctggccggctttggcttcgatcacataggtgtggttgccggttgtgaggatgaggtcgccttcgtcttctcgcccgttgaggtggaggcgttcgatattgtggccggtgtcgcgtagctggtggaggagtctcgtttcccattctgcgccggcccgccggttgcgtgcctgttgtgtggccatcatagtcctttgtgtgttgtggtcatgttccagggctgtttttctacgagtggcccgaagaatgtgtattcggggtaggctctgagtctttcgtatcgggtgccgtctgggctggatttgccggtgcgctgttttagcacggcgatgcgcgcctctgccggtatcgtgagcccgttgccgttatcttcgccaccatacaatgagactccgaggatgagttgtggtttttcggagaggccgtttttgatttcccgcctggctggcgggtgttcaatatcggtgccggttttgtcggttgcgtggtgtgtgacaataatggtggatcctgtgtcgcggcctagcgctgtgatccattgcatggcttcttgctgtgcctggtagtcggattcgcagtcttggatgtccatgaggttgtcgataacaatgatgggcgggaaggtgttccacatttccatgtaggcttgcagctccatggtgatgtctgtccatgtgatgggtgactggaacgagaatgtgatgtgttggccgtggtggatgctgtctcgatagtattctggcccgtagtcgtcgatgttttgttgtatttgctgggtggtgtgttgggtgttgagtgagatgattcgtgtggaggcctcccagggtgtcatgtcccctgatatgtagagggcgggctggttgagcatggcggtgatgaacatggctagcccggatttttggctgccggagcgccccgcaatcatgacgagatcccctttgtggatgtgcatgtccaggttgcggtagaggggttctagttgtggtatacggggcagttcggcggcggtttgggaggctctctcgaaggatcgttgtagagagagcatcggaaccttatctatctgttacggtttgggcggagagtggtggtcagatggagtcgatgtccacatcatcactgcccgtggtgttgggctggctgtctcgcttgtcaacatatgctgctacgaggtcgtagatggcgtcatccaatggtttgagaataacggcgttgaacccgtttttggtgcgcacagtggctagtttgaaggcctgctcttctcccaggtaggtttcgagttcgcggatcatggagtgtggccggtcgttgttgcctcgcgctttctcaatgatagcgttggggatggtttctggggtgccgttgttgagatcatctagggtgtggaagatggtcacatcagcgtagatgcggtctgcggtctgtccgccgtagccttcagtgttgtgctgcacgtcgtggattttgaaggcgatggcggtggcgtcctggtttcgggacgggttgaagaaggtgctgttgctgttgttgcggtagttggcgagtcccataactgttttccttttactgtttatgtttggttttgttggtttgtgtcggtttttatcgggtgaggctgttgcgtttgctgcggaaggcctctgacacgtcactgttactggtaataatctttttgtactgtttcaaaaggtcggctagctgtgtcttgctggttgcgttgctgattttgtcgatgacgatggtgttttcttgggatgcgatgttgtctacatagtttttggcggcctgatcgtatcggtcttggagaataatggatgcgctcgcgatcagggttgcgagatcccagtctttagagacggtgttgtctttgagtccgcctagcaggtcaataatggattgtttgatgtcgtctgtggtgtctccgcggatgaccgcccacggggctgcatagtcgccgccgtatttgagtgtgacggtgatacggtcatcaccactgctgttggtatcggtcactggttctcctcatctttctctgtcggtggtgtgatggtggtttggatcgggtacctgtaggcgtctttcccgttgacggcccagcatgcgtcccgtacggggcatcctttacacattgtggtgacatgggggacgaagatgccttcgctgattcctttcattgcttgactgtacatggatgatacatgccggtaggtgttgttgtcaagatcgtacagttcggtggctgtgccctcggttggcgatgtggtgttagtgcggctgatggcgggggtccaaaacatgcctttcgtcacctggatgccattctgggcgagcatgtaccggtaggtatgcaactgcatagcatcaaccggcagtcgaccggttttgaggtcgaggatgaatgtttcgccggtgttggtgtcggtgaagacacggtcgatgtagccaacaatcttggtgccgtcctggagtgtggtttcgactggatattcgatgcctggctggccgtccaaaaccgcggtgtggtattgtggatggtttgtgcgccactgtttccacctgtcgacgaagatggggccatagtgcatccaccagtcgtagtcttttttgttggggcctccggtttcgcacatgtttttgcacactctgccggagggtttgatttgggtaccctcttctttgactagggcgatttgggtgtcgaaaacattgttgaaggatgagagtttatcgggtatttcggggtattctgcgggattgtacaggtggaggtcgtattgttcggtgatgtggtgtatagcactgccggcgatggtggcgtaccaggtgtggtgttgtgcatggtagccgtgggataggcgccatttttctccgcattcggcccactgggacagggaactgtaggagatgtggcctggatggttgatgattttcgggtgttgtgctagaggcatgttagttgtttttgttccatgggttgcgggtgtctaatccggcgtcatgctgctggtaggcgaggagtgcgaggcagtgccaggcagcgtgtgccaggtggggtagccctgattcatcgtcgaggttgtgtccttgctgccaggctagcaggtgcctatagagggcgtcaacactgtggctccacgggtatcctccggtccagttgttgtcgccgtatttggtggcgccgtatccggctacttcgccgagcgagtggagggatgcggggtcgatgagggagagcctgcacagtttcaattcttttcgggctccggtgttggggtcggtgtacatgctggtgggctggtccatggggtgtgtgctccttaaaggtgggttactggttgttgttgtgggcgagtgcgacggcgagaataatgatggcgagggtttcagcaataagtatgggtgttgtgatcatttggtgttgtggggattgtaggtgagggttgatgcacctagaagcgatgcgagggcgcatgcggcgatgatggcgagggcggctttgtggctggtgccggtggcgtacatccatgtgatgatgccgccttggatccaggcgaggctggtgaagaatgtttcgtaactgtgcaactcgatgttgttgggtgtgttcatgactgttcctggatgatggtgttgatggttttgtagatgttgtacaggtcggtttcgatggtttgtagctgtttgatttggtggtcgaggttgatgtctgggttgagggtgttgatgcgggatgcgatgtcggtggctgtgcggagtgtgccgccagtgtggtgaatgatatgtgcggtgtcggcgaggccggtggtgacagcatagtgggagaggagaggcatagcggtccttggcgggttagtgttgcgggttgatgttgaggtcggtgacgtggggtgtgttttctgttccggtgacgaggcagtgaacagtgacagggagtttggaggctcccggctgacggatggtggcgccgtagacgatgctgaatgtgtctttgtcaatgattttgtggagttggaggtcgatgtcggggttgccgttccatttgacgccttgggcggcggcctgctgttcggctttgcggttgcaggtgtgggctgcggtgatcatggtgagaccctgcgctgtttcttctccgcgctgctgtgcttgctggtgtacctttttttgttcggcttgtagggagcggactgctgcggccttcctggctgtcttctcagctttgcgctgctggacggtttcgggcgtccattcggtgttggctgtggtggcttgtggtgcgggctgtgaggcgagtggcgggttgtcgtcgggtgctggcatgaatgatgctgcggcgatgatggcggctgtgattccggcgatggtgtagcctgttttcttgttcatggctctgtgttcccctttcgtggggtttgttcgttgctgacatgattaatcatggtgtgggcggtggcctgtgtcaaggctgcgctcaacgattgtgagcgatccttgtgtggctaggggttttatcgggcgcacagggtgagtaggtggccaacgttgatgcgggtcacattccagtagagttgcgtggcttcaccgccggtgagcggcttccactcgtcatggctgaacacggcgccgtcggatgcgatgaatgtgttggggcgtagtttgtggagttcggcttccacgctctgccggtaggcttcggcgaggccctcaaaatcgaggtggtcgcaggagaggttttcgaagcgtgtcaagtcgaagggtatggggcagtcgtagctggtgggggtgtagagctgggtgaagtggtcggcgatcttatgcataacgggttccttttctggtgatggtgtgttgagggtttatcgggtggatgctttgaggattgcgtctatgtcgatcatgtcgatgagatcgtggagttcctcggcttcattctcggtgagcggctgccagtcgggtggcccgtatagggcgccgtcgcgggtgacagtccacaggggccggatgagtagtatggcttcttgtactttagcgtggtacatgcggcgcaccatatcgagatccatgtcgtctgaatggtctccggtgaggctgtggaggctgagcgggtcgatttcggtctgcctgtagagggatgtgaaggatggggtgatgagtgtgccatccatgggtgtgctcctttcggtggtgtaggggttgttgtggtttctagggtgtgatggctgcgaccctacagtcaaggctgcgctcactaggtttgagcgtttcatgctggagtgtcgggtgtgacagatgtcactgcagtctctatggcctctctcagcgtctcaaatcatgtgggggtaggattatatagggttggccctgctgatcgattctagggcccttctagggtgtctcgggggtatgtctgggtgatagcaggtgttgcagatcattcggaaggtcgaggttggcatacatcacgatagctggggtgctatttctgggcatggaatctacaccctcatactgtgtgagatgtatcacatcctcctggcttggtgtgcaccctcaggatcactctgccgatctggcgtgaagggtgtagcccagaaatgccgtttaaagccttcacacgacgcctaggagcgccttacagggtgggggctaggtatttatacccccagcatattctgatcgattctagacgcctccaggagtctgctacgcgatcaaccatctcggcatagaccatcaacccttacatcagttagctaagcctcaactatgtggacagtgtgggatactgtagggggaagaaggacacggtaaaagaaagaagggggagcatcagccttaggatcttagcactgatggacttagcaccgagcccctcaagggctcggcatcagcctcatcgggcttagccgatcaggcacagacctgaaaggagtacacgccatcaggaaaggcttgagagtacgaggagccttagcgacgagtactcgaaagcctgagggaacacccatcagcactgatgggcctagcgtgttcggaaaggacacaagagtgaagtgtgagagctgtccgggagtgaaacccgttctgactaggggtttcagccttaaccacccccaaaggttacaagactctaagaaaatttaaggaaaagtttaggtttaatttttggacctttactaccaaaaacacccgtttacacccctcaaacccgcctatagagccaaacgctggtgttgagggtatctctacctagtgtgataggctggacaggtagccagctggacgcaaggccgaaatccgctgacgcggctttcacccttacatccatcagtctaccaaacacttaaaagcttcaaggcttagcgctaagcccttaagaccttaacgcttagcaccgagcccctcaagggctcggcatcagtcttaaagccttaaacacttaaagtaactataagaccttaaagaccttaagtacttaaagttaaccatcagtcttaaactttaatattatacctataagtcttaaagcttataggtataataatataatataagttataaaagttttagaagagctaaggggttaacttctttacttctctactctctttggttctttctctcttctcttcttttcttcatcaggggagaagaggaacctttaccgtcaacgctgattggctttcaccgtgtgactcgtgtaccaccggtcgcacgctccccacactctgacacccgtgtccctttcatgcttagcgtgttcggctgaaggcgtacggcgtgtcacgctaacacccttaacactaggtaagacttaaagtgtatattataggtagaagactttaaaaacctctaaggtgttcccgcttagcctgtgttctacaccgctaggcgccaagtgctaagctttgaaacgcgaacactcacccaccctcatttttctttcgtgtccttctcttttgacaccgctggggggcgatgtgatctttctcacatgccagggggtgtgagggaaaacaaccaccccggaacgttcaagacaccccctcaaagccacaaaacagcccccagaatcgactagcagggcaagggcagagtattcatacccccaacggtttccaggccgttagaggggcaaataagacccgtacagggctagacgaggaacagacacatcatggcacgaaccaaccgcacagccagccaagcccaccggcgctggcggcaacgactcatcacccaagcccgacagcaaggccaaaccgtctgcccactctgcggagtcaccatcacctgggacacccaccagctgccaaccagccccgaagccgaccacatcacacccgtcagcaggggaggactcaacaccctcgacaatgggcaaatcatctgcagaacatgcaacagaagcaaaggcaacagaacacaaccaaacattcaattccaacaacaaaccacaaaaacacttgtttcatggtgaaaaacccgccaacccccaccggggacaccccctgcacaggcgtgcaagacc

SEQ ID NO: 36 - DNA, 29200 bp, unidentified
  source 1..29200: mol_type = unassigned DNA; note = Bacteriophage of P. acnes
agtgaaatacctcccttttgtggttttgtctgtttgtcgactttttgtgttggtggtgagtgttgtgcagcctgagcttcctgatagtcgtgattggtgtggggagacgcgtcgttggtggcgtgtgtggggtgaggatagccgcgcgcagtacgtgtctgatgaggagtggctgtttctcatggatgctgcggtgattcatgattgtgtgtggcgtgagggtcgcgcggatttggtggcttcgcttcgtgctcatgtgaaggcgtttatgggtatgttggatcgttattcggttgatgtggcgtctggtggccgtggtgggggttctgcggtggcgatgattgaccggtataggaagcgcaagggggcttgagtaggtgtctggtgttgttgggtctcaggttcctcgtcatcgtgtggctgcggcgtattcggtgtctgctggcggggatgctggtgagttgggtcgtgcgtatgggttgacgcctgatccgtggcagcagcaggtgttggatgattggctggctgtcggtagcaatggcaggcttgcttcgggtgtgtgtggggtgtttgtgcctcgccagaatggcaagaatgctattttggagattgtggagttgtttaaggcgactattcagggtcgccgtattttgcatacggctcacgagttgaagtcggctcgtaaggcgtttatgcggttgcggtcgttttttgagaatgagcggcagtttcctgatttgtatcgtatggtgaagtcgattcgggcgacgaatggccaggaggctattgtgttgcatcatccggattgtgccacgtttgagaagaagtgtggttgtcagggttggggttctgtcgagtttgtggctcgtagccggggttctgctcgcgggtttacggttgatgatttggtgtgtgatgaggctcaggagttgtcggatgagcagttggaggctttgcttcctacagtaagtgctgccccgtctggtgattcgcagcagattttccttggtaccccgcctgggccgttggctgatgggtctgtggtgttgcgtttgcgtgggcaggcgcttggtggtggtaaaaggtttgcgtggacggagttttcgattcctgacgagtctgatccggatgatgtgtcgcggcagtggcggaagttggctggtgacactaatccggcgttgggtcgtcgtctgaattttgggacagtctcggatgagcatgagtcgatgtctgctgccgggtttgctcgggagcgtcttggctggtgggatcgtggccagtctgctgcgtctgtgattcctgctgataagtgggttcagtcggctgtggatgaggcggctctggttggcgggaaggtttttggtgtctcgttttctcgttctggggatcgtgtcgcgttggctggtgctggccggactgatgctggtgttcatgttgaggttattgatgggctgtcgggaacgattgttgatggtgtgggccggttggctgactggttggcgttgcgttggggtgacactgaaaagatcatggttgccggatctggtgcggtgttgttgcagaaggcgttgacggatcgtggtgttccgggccgtggcgtgattgtggctgatactggggtgtatgtggaggcgtgtcaggcgttcctggagggtgtcaggtctgggagtgtttctcaccctagggctgattctcgccgtgacatgttggatattgctgtgaggtcggctgtgcagaagaagaagggttctgcgtggggttggggttcctcgtttaaggatggttctgaggttcctttggaggctgtgtctttggcgtatcttggtgcgaagatggcgaaagtgaagcggcgtgaacggtctggtaggaagcgggtgtctgtggtatgaactcggatgagttggctttgattgagggcatgtacgatcgtatccaaaggttgtcttcgtggcattgccgtattgagggctactatgagggttctagtcgggtgcgtgatttgggggtggctattcctccggagttgcagcgtgtgcagactgtggtgtcgtggcctggtattgctgtggatgctttggaggagcgtctggattggcttggctggacgaatggtgacggctacggtctggatggtgtgtatgctgcgaatcggcttgctacggcgtcgtgtgatgttcatttggatgcgctgatttttggtttgtcgtttgtggctgttattccccagggggatgggtcggtgttggttcgtcctcagtcaccgaagaattgtactggccggttttctgtcgatgggtctcgtttggatgctggccttgtggtgcagcagacgtgtgatcctgaggttgttgaggcggagttgttgctgcctgatgtgattgttcaggtggagcggcgtgggtctcgtgagtgggcggagacgggccgtatcgtgaatgtgttgggtgcggttccgttggtgcctgttgtgaatcgtcgccgtacttctaggattgatggccgttcggagattacgaggtctattagggcttacacggatgaggctgttcgcacactgttggggcagtctgtgaatcgtgacttctatgcctacccgcaaaggtgggtgacgggtgtgtcggctgacgagttttcgcaaccgggttgggtcttgtcgatggcttctgtgtgggctgttgataaggatgatgatggtgacactccgaatgtggggtcgtttcctgtgaattctcctacaccgtattcggatcagatgcgtttgttggcgcagttgactgcgggtgaggcggctgttcctgaacgctatttcgggtttatcacgtctaacccgccttctggggaggctttggctgcggaggagtctcggcttgtgaagcgtgctgaacgccggcagacgtcgtttggtcagggctggctgtcggttggtttcctggctgccagggcgcttgattcgagtgttgatgaggccgcgtttttcggtgatgttggtttgcgttggcgtgatgcttcgacgccgactcgggcggctacggcggatgctgtgacgaagcttgtgggtgccggtattcttccggcggattctcggacggtgttggagatgttgggtttggatgatgtgcaggttgaggctgtgatgcgtcatcgtgccgagtcttcggatccgttggcggcgctggctggggctatttctcgtcaaactaacgaggtttgataggcgatggcttcgggtgctatgtcgaggttggctgctgccgggtatcagcgtgaggcggtcaggtttgctgggaagtatgcgggctattatgccgagttgggtcgtttgtggcattccgggaagatgacagatgcgcagtatgtgcgtttgtgtgtggagttggagcgtgccggccatgacggttcagcagctatggctgctaagttcgtgcaagattttcgccggttgaacggcgtcgatcctggtttgatcgtgtatgacgagtttgatgctgctgcggctttggctaggtcgttttcgactatgaagattatgaatagtgacccggatagggcgaatgatactattgatgctatggcggcgggtgttaatcgtgctgtcatgaatgctggccgtgacacggttgagtggtctgctggtgcgcagggtaggtcgtggcgtcgggtgactgatggtgatccgtgtgctttttgtgccatgttggctacgaggtcggattatacgactaaggaaagggcacttactactggtcatacgcggcgtcataagcgtggtggtaagcgtccgtttggttcgaagtatcatgatcattgtggttgtacggtggttgaggttgttggcccttgggaaccaaatagggctgatgccgagtatcagaggacgtatgagaaggcccgtgagtgggttgatgatcatgggttgcagcagtcgcctggcaatattttgaaggctatgcgtactgttggtggcatgagataatttgatgtggtttccggttgtgcgctgccggttattggtgcacagggttgtctcccgcacgggggtcaacaatgttgtgttgttttccgcaaggagtgtagggttaggctatggccgatcaaaaagttgaagaacagaatgttgacaatgatgttgtggagtccggaaaggataacggcattgttgatacagtaaaagacgatggcgggcgggaggtagccgacaatcagttgaagaatgaaggcgagggtaaatcgccggggactgattggaaggcggaggcccgtaagtgggagtctcgtgctaaaagtaatttcgccgagttggagaagcttcgtacatcgagtgacgattctgggtctactattgatgagcttcgccgcaagaatgaggaactcgaagacaggattaacgggtttgttcttgagggtgtgaagcgcgaggtggcttcagagtatggtttgtccagtgatgcgatcgctttcttatcgggtggcgataaggagtcgcttgccgagtctgcgaaagctttgaagggtttgatcgaccatagtagtggtggcgcgggtgtgcgccgtcttgcggggagtgcccccgttgatgatgttaaacgacgtgagggtgtcgcgtttgtggatgctcttgtcaataattctaggagatgatttgtgatggctgacgattttctttctgcagggaagcttgagcttcctggttctatgattggtgcggttcgtgaccgtgctatcgattctggtgttttggcgaagctttcgccggagcagccgactatttttggccctgttaagggtgccgtgtttagcggtgttcctcgcgctaagattgttggtgagggcgaggttaagccttccgcgtctgttgatgtttcggcgtttactgcgcagcctatcaaggttgtgactcagcagcgtgtctcggacgagtttatgtgggctgacgctgattaccgtctgggtgtgcttcaggatctgatttcccctgccctgggtgcttcgattggtcgcgccgtggatctgattgctttccatggtgttgatccggctacgggtaagcctgctgcggctgtcaaggtgtcgctggataagacgaagcatattgttgatgccacggattccgctacggctgatctggtcaaggctgtcggccttatcgctggggccggtttgcaggttcctaacggtgttgctttggatccggcgttctcgtttgccctgtctactgaggtgtatccgaaggggtctccgcttgccggtcagcctatgtatcctgccgccgggtttgctggtttggataattggcgtgggctgaatgttggtgcttcttcgactgtttcgggtgccccggagatgtcgcctgcctctggtgttaaggctattgttggcgatttctctcgtgttcattggggtttccagcgtaacttcccgatcgaactgatcgagtatggcgatccggatcagactgggcgtgacctgaagggccataatgaggttatggttcgcgccgaggctgtgctgtatgtggctatcgagtcgcttgattcgtttgctgttgtgaaggagaaggctgccccgaagcctaatccgccggccgagaactgatttattgttgcggtgatgtgtcaatgtgcagggggtggtgttgatgggtatcattttgaagcctgaggatattgagcctttcgccgatattcctagagagaagcttgaggcgatgattgccgatgtggaggctgtggccgtcagtgtcgccccctgtatcgctaaaccggatttcaaatacaaggatgccgctaaggctattctgcgcagggctttgttgcgctggaatgatactggcgtgtcgggtcaggtgcagtatgagtctgcgggtcctttcgctcagactacacggtctaatactcccacgaatttgttgtggccttctgagattgccgcgttgaagaagctgtgtgagggtgatggtggggctggtaaagcgttcactattacaccgaccatgaggagtagtgtgaatcattctgaggtgtgttccacggtgtggggtgagggttgctcgtgcgggtcgaatattaacggctacgctggccccttgtgggagatatgatatgaccagttttccttacggtgaaacggttgtgatgcttcaaccgactgttcgtgtcgatgatcttggtgacaaggttgaggattgggggcatcctgtagaaaccgtgttccataacgtggccatctatgcttccgtttcgcaggaggatgaggctgcggggcgtgactcggattatgagcattggtcgatgcttttcaagtcccctgttgtgggtgccggttatcgttgccggtggcgtatccggggtgttgtgtgggaggctgacgggtctcctatcgtgtggcatcaccccatgtccggttgggatgcgggcacgcagatcaatgtgaagcgcaagaagggctgatgggtagtggctcaggatgtgaatgtgaagttgaacttgccgggtattcgtgaggtgttgaagtcttctggggtgcagggcatgttggctgagcgtggcgagcgtgtcaagcgtgcggcctcggcgaatgtgggcggtaacgctttcgatagggcccaataccgtaatggtttgtcgtcggaggtgcaggttcaccgtgttgaggctgtggcccgtattggcaccacctataagggtggtaagcgtattgaggcgaagcatggcacgttggcgaggtcgattggggctgcgtcgtgatcgtttatggtgatccgcgtgtgtgggctaaacgcgtgctcaaggatgatggctggctgtctgatataccttgtgtggggacggtgcctgaggatttcagcggtgacttgatttggttggcgttggatggtggcccacagttgcatgttcgtgagcgcgtgtttttgcgggtgaatgtgttttctgatatgccggatcgtgctatgtctttggcgcgtcgtgttgaggccgtccttgttgacggggttgatggtgacccggtggtgttttgtcggcgttctactggccctgatttgctggttgatggtgcacgttttgatgtgtattcgctttttgagctggtgtgccggcctgtcgaatccgagtaagcgtatcgttgtttttttagtttgattgttttttagtttgattgttttttgggggttatgatggctggaacacgtacagcgtctaatgttcgctctgctgttacgggtgacgtctatattggtaaagctcatgccggtgatactattaagggtgttgaggctgttccttccgggcttacagctttagggtatctgtctgatgacgggtttaagattaagcctgagcgtaaaacggatgatttgaaggcttggcagaatgcggatgttgttcgcacggttgctaccgagtcttctatcgagatttctttccagctgatcgagtctaagaaggaggttatcgagctgttttggcagtcgaaggttactgccggatccgattcgggttcgttcgatatttctccgggtgccacgacgggtgttcacgccctgttgatggatattgtggatggcgatcaggttattcgctactatttccctgaggttgagcttatcgatcgtgacgagatcaagggtaagaatggcgaagtgtacgggtatggtgtgacgttgaaggcttatcctgcccagattaataatactggtaatgctgtgtctggtcgggggtggatgacggctttaaaagctgatactcctccgactcctccgccggccccggttcctccgaagcctcagccggatccgaatccgccgtctgagaactgatacacgattttagggattgttgatagatgagtgacacaggttacacgttgaagattggtgaccgtagctgggtgttggcggatgcggaggagacggctcaggctgttcctgcccgcgttttccgtcgtgcagctaagattgcccagtcgggggagtctgcggatttcgcccaggttgaggtgatgttttctatgttggaggctgccgccccggctgacgcggtggaggccctggaggggcttcctatggttcgtgttgccgagattttccgccagtggatggaatacaagcctgacagtaagggtgcctcgctgggggaatagtttggctccacggcctgattgatgattatcgtggggccatcgaatacgatttccgcactaaatttggtgtttctgtttatagtgttggtggcccgcagatgtgttggggtgaggctgtccggctggctggcgtgttgtgtaccgatacgtctagccagttggcggcccacctgaatggttggcagcgcccgtttgagtggtgcgagtgggctgtgctggacatgttggatcattacaggtctgctaatagtgaggggcagccggagcctgtggcgaggccgacggatgagcgtagggcccggtttacgtctgggcaggtggacgatattttggcgcgtgttcgtgccggtggcggggtgtctcgcgagattaatattatggggtgaatagtgtatgtctggtgagattgcttccgcatatgtgtcgttgtatacgaagatgcctggtttgaaggcggatgttggtaaacagctttctggggtgatgcctgctgagggtcagcgttcgggtagtctttttgctaagggcatgaagttggcgcttggtggtgcggcgatgatgggtgccattaatgttgctaagaagggcctcaagtctatctatgatgtgactattggtggcggtattgctagggctatggctattgatgaggctcaggctaagttgactggtttgggtcacacgtcgtctgacacgtcttcgattatgaattcggctattgaggctgtgactggtacgtcgtatgcgttgggggatgcggcgtctacggctgcggcgttatctgcttcgggtgtgaagtctggcgggcagatgacggatgtgttgaagactgtcgccgatgtgtcttatatttcgggtaagtcgtttcaggatacgggcgctatttttacgtctgtgatggctcgcggtaagttgcagggcgatgacatgttgcagcttacgatggcgggtgttcctgtactgtctttgcttgccaggcagactggtaaaacctcggctgaggtgtcgcagatggtgtcgaaggggcagattgattttaacacgtttgcggctgcgatgaagcttggcatgggtggtgctgcgcaggcgtctggtaagacgtttgagggcgctatgaagaatgttaagggcgctttgggctatctgggtgctacggctatggccccgtttcttaacgggttgcggcagatttttgttgcgttgaatccggttatcaagtctatcacggattccgtgaagccgatgtttgctgccgtcgatgctggtattcagcgtatgatgccgtctattttggcgtggattaaccgtatgccgggcatgatcactcgaatgaatgcacagatgcgcgccaaggtggagcagttgaagggcgtttttgcgaggttgcatttgcctgttcctaaagtgaatttgggtgccatgtttgctggcggcaccgcagtgttcggtattgttgctgcgggtgttgggaagcttgttgcggggtttgccccgttggcggtgtcgttgaagaatttgttgccgtcgtttggtgctttgaggggtgccgccggggggcttggtggcgtgtttcgcgccttgggtggccctgttggtattgtgatcggcttgtttgctgccatgtttgctacgaacgcccagttccgtgccgctgtgatgcagcttgtgggtgttgttggccgggctttggggcagatcatggtcgctattcagccactgttcgggattgttgctggcgtggttgccaggttggcgccagtgttcggccagattatcggtatggttgctggtttggctgcccggctggtgcctgttattggtatgcttattgcccggctggttcctgttatcacccagattattggtatggtaacccaggttgctgccatgttgttgcctatgctgatgccggttattcaggctgttgttgctgtgatacggcaggttattggtgtcattatgcagttgatacctgttttgatgccggttgtgcagcagattttgggtgctgtcatgtctgttttgccgccgattgttggtttgatacggtcgctgataccggtgatcatgtcgattatgcgtgtggtggtgcaggttgttggtgccgtgctacaggtggtggcccgtattattccggttgttatgccgatttatgtttcggtgattggattcattgccaagatttatgctgcggttatcgtttttgaggctaaggttattggcgctattcttcgtactattacgtggattgtgaatcattcagtgtctggcgtgaggtctatgggcacggccatccagaatggctggaatcatatcaaatcgtttacgtctgcgtttattaacggttttaagtcgatcatttctgccggtgttgccgcggttgtggggttttttacgcggcttggtttgtcggttgcttcccatgtgaggtctggttttaacgcggcccgtggcgctgtttcttctgcgatgaatgctatccggagtgttgtgtcttcggtggcgtctgctgttggcgggtttttcagttcgatggcgtctaaggttcgtagtggtgctgtgcgtgggtttaatggtgcccggagtgcggcttcttctgctatgcatgctatggggtccgcggtgtctaacggcgtgcatagtgtgctgggttttttccggaatctgcctggcaatattcggcgtgctctcggtaatatggggtccttgttggtgtctgctggccgtgatgtggtggccggtttgggtaacggtattaagaatgctttgagtggcctgctggatacggtgcgtaatatgggttctcagattgcgaacgccgcgaagtctgctttgggtattcattccccgtccagggtgtttcgtgaccaggttggccgccaggttgttgccggtttggctgaggggatcaccggtaatgctggtttggcgttggatgcgatgtcgggtgtggctggccggcttccggatgctgtggatgcccggtttggtgtgcgatcgtcggtgggctcgtttaccccgtacgaccggtatcggcgtgcgagcgagaagagtgttgtggtgaatgttaacggacccacgtatggtgatcctaacgagtttgcgaagcggattgagcgtcagcagcgtgacgctttgaacgctttggcttacgtgtgattgggggtgtggttcatgtttcttcctgacccgtctgatcgttctggtttgactgttacctggtctatggatccgctgtttggcgatgaacgtgtgcttcatttgacggattatacggggtcgtctccggtgatgttgttgaatgattcgttgcgcggtttgggtgttcctgaggtggagcatttttctcaaactcatgttggggtgcacggttcggagtggcgcgggtttaatgtgaagcctcgcgaggtgacgctgccggtgcttgtttcgggtgttggtgtggatcctgtgggcaggtttcgtgacggtttcatgaaagcctatgacgcgttgtggtctgcttttccccagggcgaggagggggagttgtcggtgaagaccccgtctggtcgtgagcgtgtgctaaaatgccggtttgattcggctgatgacacgtttacggtggatccggtgaacaggggttatgcgcgttatctgttgcatttgacggcttatgacccgttttggtatggggatgagcagaagtttcgttttagtaacgcgaagttgcaggattggttgggtggcggccctgtcggcaaggatggtacggcgtttcctgtggtgttgacgcctggtgttggttcgggttgggataacctgtctaataagggtgatgtgcctgcgtggcctgtgattcgtgtcgagggcccgttggagtcgtggtctgtgcagattgatggtttgcgtgtgtcttcggattatcctgtcgagaagtttgattggatcactattgatacggatcctcgtaagcagtctgcgttgttgaatgggtttgaggatgtgatggatcgtttgaaggagtgggagtttgcgcctatcccgcctggcggttctaagagtgtgaatattgagatggttggtttgggtgccattgttgtgtcggtgcagtacaggtttttgagggcttggtgaatagttgatggctggtcttgttccgcatgtaacattgtttacgccggattatcgtcgtgtggcgcctatcaatttttttgagtcgttgaagttgtcgttgaagtggaatggtttgtctacgctggagttggtggtgtcgggggatcattccaggcttgacgggttgactaggccgggtgcacggctggttgttgattatggtggtggccagattttttctgggcctgtgcgtcgggtgcatggtgtgggtccgtggcgttcttcgcgggtgactatcacgtgtgaggatgatatccgcctgttgtggcgtatgctgatgtggcctgtgaattatcgtcctggtatggttggtatggagtggcgtgcagacagggattatgctcactattcgggtgcggctgagtcggttgctaagcaggtgttgggggataatgcttggcgttttccacctggtttgtttatgaccgatgatgagcgtcgtggccgctatattaaggattttcaggtgcggtttcacgtgtttgccgataagttgttgccggtgttgtcgtgggctcggatgactgtcacggtgaaccagtttgagaatgcgaagtttgatcagcggggtttgctgtttgattgtgtgcctgctgtgacacggaaacatgtgttgactgccgagtctggttcgattgtgtcgtgggagtatgtgcgtgacgccccgaaggcgacatctgtggtggttggtggccgcggcgagggtaaggatcggctgttttgcgaggatgttgattcgatggccgaggatgactggtttgatcgtgtcgaggtgtttaaggatgcccgtaacacggattctgaacatgtgcatctcatcgatgaggctgagcaggtgctgtccgagttaggggccacgtcggggtttaagatcgagttggctgagtcggatgtgttgcggtttgggccaggcaatctgatgcccggggatttgatctatgtggatgtgggttctggccctattgcggagattgttcggcagattgatgtggagtgtgattcgcctggtgatggttggacgaaggtgacaccggttgcgggggattatgaggataatccgtcggccctgttggctcgccgtgtggctggtttggctgcgggtgtgcgggatttgcaaaagttttagtaagtgattggggtttgttgtgggtattgtgtgtaaagggtttgatggtgtgttgaccgagtatgattgggctcaaatgtctggtctgatgggtaatatgccgtctgttaagggcccggacgattttcgtgtcggtacgacgattcagggtgccacagtgttgtgtgaggtcatgccggggcaggcttgggctcacggggtgatgtgcacgtcgaatagtgttgagacggtgacggggcagcttccgggcccgggtgagacccgatacgactatgtggtgttgtctcgggattgggaggcgaacacagccaagttggagattgttcctggggggcgtgcggagcgtgccagggatgtgttgagggctgagcctggcgtgtatcatcagcagttgttggctactttggtgttgtcgtctaacgggttgcagcagcagttggatcggcgtgctatagcggcccgtgtagcgtttggggagtctgcggcttgtgatcctacccctgtggagggtgaccgggtgatggttccttcgggggctgtgtgggctaatcatgccggcgagtggatgttgttgtctccgcggatcgagacgggttcgaagtcgatcatgtttggcgggtctgctgtgtatgcttacacgatcccgtttgagcgccagttcagtagtccgcctgtggtggtggcgtctatggctacggcggctgggggcacgcagcagattgatgtgaaagcctacaatgttactgccaaggattttggtttggcgtttatcacgaatgacgggtctaaaccgaatgatgtgcctgcggttgcgaattggattgctgtcggcgtgtaatgcgcggcttgcgggtatgtgacatgttgtggtggttgtagtggtagggggctgtagtgtcatggcttacacccacactcgtagcctctatttgtaccgctatcgctactgtccttggttcgattcaggcggctacgtacaggtcgaagaagaggcttaggcagttgtctgcgcaggttgatgcgatggaagaatacacgtggaatattcgccatattgttcatcgctataacgcgaatctaccggagaatgttgagcctgtaaagatgcctgatttgcccgagtttttgaaggatactgttgatggtggtggggggtgaattgtgagggagttggaggaagagaagcggcagcgccgctcgtttgagaaggcttccctgatactgttgttcctgtcgcttgtgctgttggcggtggttgctgggggtgctttacgtttcggtgctgtggcttcccagcgggattcggagcaggctaaagcccagtcgaatggtacagccgctaaagggttggccagccgtgtgcggcaggtgtgtgcctctggcgggcaggagtcggtgcgtcttcaccggtctggcttgtgtgtggatgctcagcgtgttgagcgtagcgtgcagggtgtgccgggtcctgctggtgtgcgcggcccgcaagggcctgcaggggttgacggccgggatggtgttaatggttcagctgggctggttggccctgttggtccgcagggttccccgggtttgaatggtgtgaagggtcctgacgggctgcccggtgctaacggcaaggatggtgttgccggtgtgaacggggctgatggccgggatggcgtgccaggtagggatggcgctgatggggctgatggtggccgtggccctgttggtccccctggtgtagccggtgcacagggtgagcgtggccctgttgggcctcaggggccgcagggttctgccggtgccgatggcaaggacggtaaagatggtaaggatgggcgctcggtggtgtctgtgtactgttccgggggccgcctggttgtgaaatatagtgacggtacggcctctaccatagcgggttcggtggcctgccagggtgtgaaaccatcaccggtggttaccgtatcatcccacaagtaaaagaggaagggtgttactagtgttgatagtagtgtttgggggtggcgtgttgtgagatacattccagcggcgcatcactctgccggatcaaataagccggtgaaccgtgttgtgattcacgcgacatgcccggatgtggggtttccgtctgcttcccgtaatgggcgggcggtgtccacggcgaactattttgcttccccatcgtcgggtggttctgcccattatgtgtgtgatattggggagacggtgcagtgcttgtcggagtcgactattggttggcatgccccgccgaatccgcatagtttgggtatcgagatttgcgcggatgggggttcgcacgcctcgtttcgggtgccggggcatgcttacacgagggagcagtggctggatcctcgcgtgtggcccgccgtggagagggcggctgtcctgtgtcggcagttgtgtgacaagcatggtgttccgaaaaggaagcttagtgcagccgatttgaaggctggcaggcggggcgtgtgcggtcatgtggatgttactgatgcgtggcatcagtcggatcatgacgatccggggccgtggtttccgtgggacaggtttatggccgttgtcaacggcggtagtggtagtgaggagttaactgtggctgatgtgaaagccttgcatgatcagattaaacaattgtctgctcagcttactggttcggtgaataagctgcaccatgatgttggtgtggttcaactacagaatggtgatttgggtaagcgtgttgacgccttgtcgtgggtgaagaatccggtgacggggaagctgtggcgcactaaggatgctttgtggagtgtctggtattacgtgctggagtgtcgtagccgcatcagtaggcttgagtcgactgtcaacggtttgaaaaagtgatggtggtttgttgtgggtaaacagttttggttgggcttgtttgagcgtgccctgaaaacttttattcaaacgtttgttgctgtgttgggtgtgacggcgggtgtcacgtatactgcggagtcgtttcgcggtttgccgtgggagtctgccctgattacggccacggttgctgcggtgctgtcggttgctacctcgtttggtaatccgtcgtttgtggccggtaagcctaaaaccacggttgtggatgctgggcttgttccacccgacgatgggggcatggttgagccgcacatggttgatgtgtcggatcctggcatgatcgagcctgtcgatgatgcggatgttgccggctatgagcctcggcgtgcagccgagtcggaggttggcacggtagagcctgattgaatgataagtgaatatgtgtgtgccccagcggtgctgccacgatcgtgtggtggttgccgctggggcactatttttgtgtctacaggggttttacaggttgtcgtctagtgtgtcttcgagcatctggtccaggtggaggcaggcggagatagtatcgttggcctggtctagaacgttccggccgataacatttttgtggttgtcgcggtgactgatgatagactgcatgatatcttcggcctccacgtgcagtagtttggtttggtatgcgattccggcgagccagtctagtgcttcctggcttgcataggggctctggtcctcgctgttgtcacgggtgttgctgttgtttgggtgtcctgcactgtcgcaaaaccacaagatttcgctgcactcgtctagcgtgtcctggtcgatagtgagatcgtcgaggctgacttcgttaacagtaaggttcacattgtcgagtgagatgggtacaccgtactggttttcgacaccgccaacaatgttttccaattgctgcatgttggtgggctgttgttggatgattcggtgtaccgctgctttgagggcagtgtgggggatattggttgtgttgttcatcgtgttatgccattccttcattatcgtctggcatgtagtatgtgctgtttgcgtactcggttaacgtcatcagtgtttggtctgcccactgtttcacggtttgtcgggtgactccgagccggtgcgccgcggcggagtatgtttggtcatacccgtatacttcacggaatgctgccaacctggctagccgtttcctctgtttggatggctggcaggtgagggtgtagtcgtcgatggctagctgtagatcgatcatggtgacgatgttgttgccgtggtgttgtggcgcggttggtgggggtggcatgcccggctccacactgggtttccatgggccgccgttccagatccattgtgctgcttggatgatttctgcggtggtgtaggttcggctcactggtcatcccctgaataggttgtcgaggttgtctgggttgctggtgttggtggtgtcgaatcgtcccacgcagtggcagtagtcgtacatgagtttgataatgtgttggtggtcgccgaggtaggtgtttccgctgatgctgtaggtggctgtgccgtcttttgcgatggtgtatttggcggtgatggtttcgggtgtttcggtgttggtgatgattgctgtggtggtggtgcctacggtttggagtatggtggtttgggttccgtcgtcgaggatggttttaaccatggtgtgtgttctccctttgtgttagttgcttgtctggttgtcggctagatgaataatatcggataaaggtttcggctggtctaggtgttgtatggttttgttggctagccgtttggctaccctgtagcacattttggtatagtgtttgttgtctaggttgtggtattgttcccgcaccgcaatatatagtagggagtcttggtacaggtcgtctgcgctgattgcggggtagtgtgtggctattttggtgcatgcccggttgagtgtgcgaagatgatggtctgtggcccatccccacgatgcggtggtggccaggtctgcttttgttggtcgtctgctcatggcactatttcatctcgctatctggtagttgtttggtgttttgttgtggatagtgtagcacactagtccggggtggccggtggtgcctgtgcggtgccggtaccagacggattcgccttccatggatgggcattggatgaaggtgcgttgtccttgctcggatatttctaggtggtgccggtgccctgccatgaggatgtgggatgtggtgccgttgtggaattcttggccgcgccaccattcgtactgtttgccggttttccattggtgcccgtgggcgtgcaggatttgtgtgccggccacttcaacggtggtggtcatttcgtctcggctggggaagtggaagtgaaggttggggtagttgttgttgagttggtaggcttctgcgatggcccggcagcagtccacgtcgaaggagtcgtcgtaggtggtgacgcctttaccaaatcgtactgcttcaccgtggttgccggggatggatgtgatggtgacgttggcgcagtggtcgaacatgtggacgagttgcatcatggccatgcgggtgagcctgatttgttcggtgaggggtgtttgtgtgcgccaggcgttgttgcctccttgtgacacgtatccttcgatcatgtcgccgaggaaggcgatgtggacccgttgcggtttgcctgcctgttgccagtagtgttttgcgactatgagggagtgcaaatagtcgtcggcgaagtgtgctgtttctccgccggggatgcctttgccgatttggaagtcgcctgccccgatgacgaaggccgcagtgctgtagtcggtgtgggtgtcttgttcgggttttggtggctgccattcggctagtttgttgacgagttcgtctacggggtaggggtttgttgcgggttggtggtcgatgattttttgtatggatcggcctgtttctccgttgggtaaggtccattcggagatgcgtgtgcggcgtacagtaccgttggctagattgtcgtcgatggtgtcgatggcgttgtcgtggttggctagctgtgtgagtagccggtctatattgtctatcactggttttcctcttctgtttgtggggtggtgttggcttgtttgcggcgatagtctttaatgacggtggcggagatggggtatccggcttcagtgagcatttgggctagctgtgtggcggggatggttttgtcggcgaggacgtctgcggctttgttgccgtagcgttggatgagggtttcagttttggttgccatgatgtcctaggggttgtgtggtgggctgccatcctgtgcggcagtcgccgtcgtgtcctggtttgcgtgtgcaccatgagacttcgccggcattgtggatgatggcacggccgcatatgacgtcatgtaggtgttcgggaaacttatcgttgttgttgtccccgtacatgtcgatcaagtgttgggttttagtaaccatcatgtctcctatgtgtgaaagagtgtgcaaatactatgcttgtgtcatggatgtttatgcgggtatggttttcatcaccttgctgaacgttacttggttactgtacatcatctgggtgatttcctgatccgttttgtcggggtgctgttttcgcaggtttgcccattggcaggcgttgtcggtttcttgctggagccgggtgagattgttttcggtgatgatttgtttccacattgtccacgagacgtcgagtcgtttgagcatgtcgagggctggcacgttgaactggtcgaggaagagtatttcctccgtgtagtactgtttttcgtattggtcccatccgcttcggtgtctgttgggctggtttttggggtaggcttcccggcatactttgtgcaaacgtttggccatgtctttgggtagcctaatgtcggggttggcgcggatcatggatcgcatcccatcataggtggtgccccaggtgtgcatgatgcggagtgggtcttcaccgtcggcccatttttctgcacagattgcgaggcggatgcgtctcctggcggctttgctggtgttgcgccggccggggatggggcacgtgtcgagggggtccatgatgttttctatgcctttcttggagtgatgttttgtttgtctggttttattgtagcactgtgtctagtgcttgtgtcaaccctgttttgcctgttttcaggtaggtgtctgtgacatccccgacagtgaggggtacgtgtatggcttgggggagtgccgtctggagggtttgggccatctggtctcctgctttgtcggggtcggaccagatgtagatgcggtcgtagccttcaaaaaatttggtccagaaagtttgccacgaggtggccccgggtagggctacggccgaccatccgcattgttcgaggatcatggagtcgaattcgccttcgcaaatgtgcatttcggctgcagggttggccatggcggccatgttgtagatggagcctgtgtcccctgccggggttagatatttggggtggttgtgggttttgcaatcatgctggagtgagcagcggaaacgcatttttcgtatttcggctggctccccccagacggggtacatgtaggggatggtgatgcactggttgtagtcttcgtggcctgggatggggtcattgtcgatgtatccaaggtggtggtagcgggctgtttcttcgctgatgcctcttgctgagagcaggtcgagtatgttttcgaggtgggtttcgtagagggccgaggctttctggattcggcggcgttccgcaatgttgtatgggcgtatactgtcgtacattcgggtttctttcttctaatcgttgttgtagctggttgagtccgcctccgacaccgcatgtgtggcagtaccagacgcccttgtcgaggttgatgctcatggagggctggtggtcgtcgtggagagggcagaggatgtgttgctcgttcctggacggattgtagcgtatgtggtagaggtcgaggaggcggcaggtgtcagaggtgtgggaggagctcgttgagggttgataccacataggcttcactccagggcttgttgcgctgttttatcactacgagtccgatggcggattggttttgtttgtttcggtgtgtttcgtagttgcgtgcctcccggctggcttgtttcacgaattcggcgaggtgtggctgcccggctttcgcctcgataatgtaggttttgtggccggttgtgaggatgaggtcgccttcgtcttcgcggccgttgaggtggaggcgttctatatcatggccggtgtcgcgtagctggtggaggagtcgtgtttcccattctgcgccggctcggcggttgcgtgactgttgtgttgacatgatagtcctttgtggtgttcggtcatgttccatggctgtttttcggcgagtggcccgaagaatgtgtattcggggtaggctctgagtcgttcgtatcgggtgccgtcggggctggatttgcctgtgcgctgtttgagtacggcgatgcgtgcctcggcggggatggtgagcccgttgccgttgtcttcgccaccatacagggagactcccaatatgagttgtggtttttcggagaggccgtttttgatttcccgcctagccggggggtgttcgatgtcggagccggttttgtcggtggcgtggtgggtgacaataatggtggagccagtatccctacccaatgctgtgatccattgcatggcttcctgttgggcctggtagtcggattcgcagtcttgaatgtccatcagattgtcgataacaatgagtggtgggaaggtgttccacatttccatgtaggcttgcagttccatggtgatgtctgtccatgtgatgggtgactggaatgagaatgtgatgtgttggccgtggtggatgctgtctcgatagtattctggcccgtagtcgtcgatgttttgttgtatctgggcggtggtgtgttgggtgttgagtgagataattcgtgtggaggcctcccagggtgtcatgtcccctgatatgtagagggcgggctggttgagcatcgctgtgatgaacatggctagcccggatttttggctgccggaccgccccgcgatcatgaccaaatcccctttgtgaatgtgcatgtccagattgtcatacaagggtgctagttggggtatgcggggcagttcggcggctgtttgggaggctctctcgaaggatcgttggagagagagcatcggagccttaatctatctgtctatcggttggatgatgttttggtggtcagatggagtcgatgtcgatgtcagcatcagttgaggctgtggtgtcgtctagctggccgttatcgcgtttgtctacgtattcggcaaccttatcgtagatggcgtcgtctaatggtttgagcacgaccgcgttgaacccgtttttggtgcgcacggtggcgagtttgaatgcctgttcttcgccaaggtaggcttctaggtcgcggatcatggagtgtgggcggtcgttgttgccgcgggctttctcgataatggcgttggggatggtttctggggtgccgttgttgagatcgtctagggtgtggaagattgtgacatcagcgtagatgcgatcggcgacctgtccaccgtagccttcggtgttgtgctggacgtcgtggattttgaaggcgatggcggtggcgtcctggtttcgggacgggttgaagaaggtgctgttgctgttgttgcggtagtttgcgagtcccattgttgtttcctttactgtttgtgttgttttgtttgttggtttgtgtcggtttttatcgggtgaggctgtttcgtttgctgcggaaagcctcagacacgtcactgttactagtgatggtcttcttgtactgtttgaggaggtcggctagctgtgccttgcttgtggcattgttaattttgtcgatgatggtgttgtttccttctgaggcgatgttgtctacgtagtctttggctgcctggttgtatcggtcttggaggatgatggatgctgtggcgatcagtgttgccaggtcccagttccgtgccgcggagctgtttttgagtccgcctagcaggtcgatgatagccttctttacctggtcggcggtgtctccgcggatgacggtccatggggcggcgtagtcgcctccgtatttgagtgtgacggtgaatcggtcgtcgtctgtgttgtcggtcactggtgctccttgccttcttttgttggggctgtgatggtggtttctatagggtacctgtaggcgtctttcccgttaacagcccagcaggcgtccttgacggggcatcctttacagagtgctgtgacgtggggtacgaagatgccttcgctgattcctttcattgcttgactatacatggatgatacatgccggtaggtgttgttgtcaagatcgtagagttcggtggatgtgccctgttcgaccgattgctcgtctcccttggtggtggcgggtgtccaaaacatgcctttcgtcacatcgttgccgtgttgggcgagcatgtaccggtatgtgtgcagctgcatactgtcggcgggtagacggccggttttgaggtccaaaatgaaggtttcgccagtgtcggtgtcggtgaagatacggtcgatgtagccaacaatcttggtgccgtcgtcgagggtggtttctaccgggtattcgatgcctggctggccgtcaataacagcggtgatgtattctgggtggttgcgcctccatgttttccaccggtccacaaaggtggggccgtatatcatccaccaattgtagtctttcttgtgtggcccgcccgactcgcacatgtttttgcacaccctgccggagggtttgatttcggtgccttcggattcagcgagggcgacttgggtgtcgaaaatgtttgtgaaggatgagagtttgtctggcagtgcagggtattcgtcgggattgtacaggtgtaggtcgtattgttcggtgatgtggtgtatggcgcttccggcgatggtggcgtaccaggtgtggtgttggacatggtacccgtgggataggcgccatttttctccgcattcagcccactgtgacagtgatgagtaggagatgtggcctggatggtgtatggttttcgggtattgtgctaggggcattacttgtcgcttttgttccatgggttgcgggtgtcttggccggcatcgtgttgctggtaggcgaggagtgcgaggcagtgccaggcagcatgggccaggtggggtagcccggattcgtggtcgaggttgttgccttgctgccatgatagtaggtgccggtagagggcgtcgacactgtggctccacgggtatcctccggtccagttgttgtcgccatatttggtggcgccgtagcctgccacggagccgagggcgtgtaaggctgtggggtcgatgagggatagcctgcaaagtttgagttcttttcgggcaccggtgttggggtcggtgtacatgcgggttggcttatccatggggtgtgtgctccttagaggtgggttactggttggggttgtgggcgagggcgacggcgagaataatgatggcgagggtttcagcaataagtatgggtgttgtgatcatttagtgtctcggggattgttggtgagtgtggaggcacccaggagggtggcgagggcgcatgcggcaataatggcgagggcggctttgtggctggtgccggttgcgtacatccatgtgatgatgccgccttggatccaggctaggctggtgaagaacgtttcgtagctgtgtagctcaatgttgttgttgagtgtgttcatgcttgctcctgaagaatggtgttgatggttttataaatgttgtacaggtcggtttcaatagataacagttggtggatttcgtggtcgagatcaatgtctgggttgagggtgttgatgcgggaggcaatatcggtggctgtgcgtagtgtgccgccggtgtggtgaataatgtgtgccgtgtcggcgagtccggtggtgacagcgtagtgggataggagaggcatagcgggggaatgctccttggcgggttactgttgcgggttgatgttgaggtcggtgacgtgcgggtggtcttctgttccggtgacgaggcagtggacggtgactgggagtttggatgcgccgggctgtttcgcggttgcgccgtagatgatggagaatgtgtctttaccgatggttttgtggagttggaggtcgatgtcggggttgccgttccagttgacgccgtgtgcggcggcctgttgtgcggctttcttgttgcaggtgtgtgctgccgtgatcatggtgagtccggtggcggtttcttcaccccttgcttgggcttgcttgtgggctttccgctgttcggctcgcagtgactgttctgcggctgcctggcgggctttcttttcggctttgcgctgccggacggttttgggtgtccattcggtgttggctgtggtggcctgtggggctggcatgaatgaggcggcggcgatgatggcggctgtgatgcctgcgatggtgtatccgtttttcttgttcatgactttgtgttcccctttccggggtgttgttcgttgctgacataattaatcatggtgtgggcggtggtctgtgtcaaggctgcgctcaacgattgtgagcgattcgtgtgtggctaggggttttatcggctgtacagggtgagtaggtggccaacattgatgcggctcacattccagtagagttgcgtggcttcacccccggtgagtggcttccactcgttgtggctgaacacggttccatcggatgctatgaatgtgttggggcgtagcttgtggagttcggcttccacgctctgccggtaggcttcggcgaggccctcaaaatccatgtggtcgcaggataggttttcgaggcgtgtcaggtcgaagggtgtggggcagtcgtagctggcgggggtgtagagctgggtgaagtggttggcgatcttctgcataattatgtccttttcgttgcttataacgttgttgagggtttatcgggtggatgcgacaaggatggcgtctacgtcgatcatgtcgatgagatcgtggagttcctcggcctcattctcggagaggtggcgccagtcgtagtcgccgtacacggcgccgtcgagggtgacagtccacagaggccggatgagtcgtatggcttcttgtactttagcgtggtacatgcggcgcaccatatccagatccatgtcgtctgaatggtttccgatgaggctgtggaggctgagtgggtcgatttctgtctgcctgtagaggctggtgaatgatggtgtgatgagtgtgccatccatgagggtgtgctcctttcggtggtgtaggggttgttgtggtttctagagtgtgcgggctgcgaccccatagtcaaggctgcgctcattcggattgagcgtttcatgctggagtgtcgggtgtgacagatgtcactgaagtctttattgcctctcccagcgtctcaaatcttctaggggtaggattatatagggttgaccctgctgatcgattctagggcccttcgagggcgtatcaggggtatgtctaagttatggcaggtgtggcagagtattgagtgagtcaaagtgccgagcttagacataagatctatcatctaggtgtgtgagatgtatcacactctcctggcttggtgtgcaccctcaaggccactctgccaatctggcgtgaagggtgtagcccagaaataccgtttaaagccttcacacggcgcctaggagcgccttacagggtgggggctaggtattcatacccccaagcaattctgatcgattctagacgcctcccagagcctcatacgcgatcagccatctcggcatagaccaccagcccctatcctggttagctaagcctcaactatgtggacagtgtgggatactgtgggggaagaaggacgcggtacaagaaagagggggggagcatcagccttagggtcttagcactgatgggcttagcaccgagcccctcaagggctcggcatcagcctgacagcccgagcaggctcagccgatcaggcacagcactgaaaggagtacacgccatcagggaaggcttgagagtacgaggagccctagcgacgagtactcgaaagcctgagggaacacccatcagcactgatgggcctagcgtgttcggaaaggacacaggggtaaggtgtgacagctgtccgggagtgaaacccgttctgactaggggtttcagccttaaccaccctcaaaggttacaagactctaagaaaatttaaggaaaagtttaggtttaatttttggacctttactaccaaaaacacccgtttacacccctcaaacccgcctatagagccaaaaccaccagtttgactcatcccaggtggggtatgataggctggacaggtagccagctggacgcaaggccggaaagtgctaacgcacttcccaacctcgcttaccatcagtctaccaaacactttaaagattcaaggcttagcgctaagcccttaagaccttaacgctgaacaccgagcccctcaagggctcggcatcagttttaaagccttaaagtcttaaagtacatatataaccttaacagttaaacgttaaaagctttaagccttaacacctaagttaagtataaaaccttaaaggctaagcacttaaggatataaactttacatcagtgtttaagactttaaaacttaaaataactattaagactttaaagcttataagctttaaacacttaaagtaactataaaacattaaagaccttaagtacttaaagttaaacatcagtcttaaactttactatgataacctataagtcttaaagcttataggtataataatataatataagtattaaagcttataagttataaaagttttagaagagttaaggggttaacttctttacttctcttctctctttggttcttcctctcttctcttcttttcttcatcaggggagaagaggaacctttaaccgtcaacactgatggactttcaaccgtgtgtctcgtgtaccaccggtcgcacgctcccggtttgtacattccccacactctgacacccgtgtccctttacggcttggcgtgttcggctgaaggcgtacggcgtgtcacgccaacacccttaacaccgggtaagacttaaagtgcatattatatgtagaagactttaaaaacctgtcaggtgttcccgttgagcctgtgtcctacaccgctaagtattaagtgctaggcgccaagcggtaagctgtgaaacgcgaacacccacccccctttttctttcgtgtccttctctttttgacacagctggggggcgatgtgatctttttcacacccatggggggtagtggagaaaacaaccaccccagcaagttcaagacaccccctcaaacgaacaaaacagcccccagaatcgaacagcagggcaagggcaaggtattcatacccccaacggttcccaagcccttagagaggcaatgagaggctcgcaggggtcataggagatcgggggacgtgatggcacacaccaaccgcaccgcatcctccgcccatcggcgctggcgggcaagactcatcacccaagcccgacaacaaggccaaaccgaatgcccactctgcggagcccagatagcctggggcacacatgacctgccaaccagccccgaagccgaccacatcacacccgtcagccggggaggactcaacaccctcgacaacgggcaaatcatctgcagaacatgcaacagaagcaaaggcaatcgcagcgaaccaaacattcaattccaacaacaaaccacaaaaacgttgattccatggtgaaaaacctgtcaacccccaccggggacaccccctgcacacccgtgcaagacc

SEQ ID NO: 37 - DNA, 29464 bp, unidentified
  source 1..29464: mol_type = unassigned DNA; note = Bacteriophage of P. acnes
agtgaaatacctcccttttgttgttttatcgttttgtcgacatttcttgttctgtgtttggtggtgttgatggtgcagcctgagcttcctgagggacatgagtggtgtggggagacgcgtcattggtggcgtgtgtggggtgaagatgcgcgtgcccagtttgtgtctgatgaggagtggctgtttctccttgatgctgcggtgattcatgatgtggtgtggcgtgaaggcagggcggaccttgtggcttcgcttcgtgctcatgtgaaggcgtttatgggcatgttggatcgttattcggttgatgtggcgtctggtgggcgtggcgggggttctgctgtggcgatgattgaccggtatcggaagcgtaagggggcctgattaggtgtctggtgttgttggttctcaggttcctcgtcatcgtgttgctgcagcctattcggtgactgctggcggggatgctggtgagcttggtagggcttacgggttgacgcctgatccgtggcagcagcaggtgttggatgattggctagcaatcggggctagtggtcggcttgcgtctggtgtgtgtggggtgtttgtgcctcgccagaatggcaagaatgctattttggagattgtggagttgtttaaggcgactattcagggtcgccggattttgcatactgctcacgagttgaagtcggcccgtaaggcgtttatgcggttgaggtcgttttttgagaatgagcggcagtttcctgatctttatcgtatggtgaagtcgattcgtgcgacgaatggccaggaggctattgtgttgcatcatccggattgtgccacgtttgagcgtaagtgtggctgtccgggttggggttcggttgagtttgtggcccgttcgcgtggttcggctcgcgggtttacggttgatgatttggtgtgtgatgaggctcaggagttgtcggatgagcagttggaggcgttgcttcctacagtaagtgctgccccgtctggtgatcctcagcagattttccttggcacgccgcctgggccgttggcggatggttcggtggtgttgcgtcttcgtgggcaagcccttggtggcggtaaacgtatcgcctggacggagttttcgattcctgacgagtcggttccggacgatttatcaaggtcttggcggaagttggcgggtgacacgaatccggctcttggtcgtcgtctgaatttcggtacggtgtctgatgagcatgagtcgatgtctgcggcggggtttgctcgggagcggcttggctggtgggatcgtggccagtctgctgcgtcggtggttcctgctgacaagtgggcccactcggcggttgatgatgttgagcttgttggcggtaaggtgtttggtgtctcgttttctcgttcgggggatcgggttgctttggctggtgctggccggactgatgctggtgttcatgttgaggtgattgatgggctgtctggaacgattgttgatggtgtggggcagcttgcggattggttggcgttgcgttggggtggcacggatcggattgtggttgccggctcgggtgcggtgttgttgcagaaggccttgacggatcgtggtgttccgggccgtggcgtggtggttgcggatactggggtgtatgtggaggcttgtcaggcgtttcttgagggtgtgcgttcgggtgttgtgtctcatcctcgtgctgattctcgccgtgacatgttggagattgctgtgaggtcggcggttcagaagcgtaaagggtctgcgtggggttggggttcctcgtttaaggatggcagtgaggttcctttggaggctgtgtctttggcgtttttgggggctaaacagttgaggcgtggccgtcgtgatcgtggtggtaggaagcgggtgtctgtggtatgaactcggatgagctaaatctgattgagggcatgtttgatcgtatcagggggttgtcttcgtggcattgccgtattgagggctactatgagggttctagccgggtgcgtgatttgggggttgctattcctcccgagttgcagcgggtgcagacggtggtgtcgtggcctggtatagctgtggatgctttggaggagcgtctggattggcttggctggactaatggtgacggctacggtttggatggtgtgtatgctgcgaatcggcttgctacggcttcgtgtgatgtgcatcttgatgcactaatttttgggttgtcgtttgtggctgttattccgcaagaggatgggtcggtgttggttcgtcctcagtcaccgaagaattgtactggccggttttctgccgatggttctcgtctggatgcgggtttggtggttcagcagacgtgtgatcctgaggtggttgaggcggagttgttgttgcctgatgtgattgttcaggtggagcggcgcgggtctcgtgagtgggttgagacgggccgtatcgagaatgtgcttggtgcggttccgttggtgccgattgtgaatcgtcgccgtacttctaggattgatggccgttcggagatcactcggtcgattcgtgcttacactgatgaggctgtgcgcacgctgcttggacagtctgtgaatcgtgacttttatgcctacccgcaaaggtgggtgacgggtgtgtcggctgacgagttttctcagcctggctgggttctgtcgatggcttctgtgtgggctgttgataaggatgaggacggtgacacgccgaatgtggggtcgtttccggtcaattcgccgacaccgtattcggatcagatgcgcttgttggcgcagttgacggcgggtgaggcggctgttccggagcgctatttcgggtttattacgtctaatccgccttcgggtgaggctttggctgctgaggagtcgaggcttgtgaagcgtgctgagcggcggcaaacgtcgtttggtcagggctggctgtcggttggttttctggctgccagggcgttggattctcgtgttgatgaggcggacttttttggtgatgtgggtttgaggtggcgtgatgcttcgactccgactagagctgctacggctgatgctgtgacgaagcttgttggtgccggtattttgcctgcggattctcggacggtgttggagatgttgggtttggatgatgtgcaggttgaggctgtgatgcggcatcgtgccgagtcgtctgacccgttggctgcgcttgctggagctatttcgcgtcaaactaacgaggtttgatggatggtttcgggtgtgatgtcgaggctggctgcgactgagtatcagcgtgaggcggtcaggtttgctggaaagtatgcgggctattatgccgagctgggtcgtttgtggcattctgggaagatgagtgacacacagtatgttcgtctatgtgtggagttagagcgtgccggtcattatggttcagcagcgctggctggcaagtttgtttcagattttcggaagcttaacggtgtcgatcctggtttgatagtgtatgacgagtttgatgctgccgccgctttggctaggtcgttttcgactatgaagattcttaatagtgacccggatagggcgaatgacactattgatgcgatggcggccggtgttgatcgtgccgtgttgaatgctggtagggatacggttgagtggtctgcgggtgcgcagggccggtcgtggcgtcgtgtcacggatggtgatccgtgtgctttttgtgccatgttggctacgaggtcggattatacgaccaaggaaagggcgctcactacgggtcatactcggcgtcataagcgtggtggtaagcgcccgtttggttcgaagtatcatgatcattgtgggtgtacggtggttgaggttgttggcccttgggagccaaatagggctgatgccgagtatcagaggacgtatgagaaggcccgcgagtgggttgatgatcatgggttgccgcagtcgcctggcaatattttgaaggctatgcgtactgttggcgacatgagataaatggtttccggttgtgcgccgccggttatcggtgtacgggttgtctcccgcacggggggcggcaagattggtgttgttttccgcaaggagtgtagggttaggctatggccgatcagaatgttgaagaacagaatgtcgacaatgatgttgtggagtccggaaaggataatggcattgttgatacagtaaaagacgatggcgggcaggatgtagccgacaatcagttgaagaatgaaggcgagggtaaatcgtctgggactgattggaaggctgaggcccgtaagtgggagtctcgtgctaaaagtaatttcgccgagttagagaagcttcgcgcctcggatggtgatgcggggtctactattgatgagcttcgccgcaagaatgaggaactcaaagaccggatcaacgggtttgttcttgagggtgtgaagcgcgaggtggctgccgagtgtggcctgtcgagtgatgcgatcgctttcttgtcgggtggcgataaggagtcgcttgccgagtctgcgaaagctttgaagggtttgatcgaccatagtagtggtggcgcgggtgtgcgccgtcttgcggggagtgcccccgttgatgatgttaaacgacgtgagggtgtcgcgtttgtggatgctcttgtcaataattctaggagatgatttgtgatggctgacgattttctttctgcagggaagcttgagcttcctggttctatgattggtgcggttcgtgaccgtgctatcgattctggtgttttggcgaagctgtcgccggagcagccgactattttcgggcctgtgaagggtgccgtgtttagtggtgttcctcgcgcaaagattgttggtgagggcgaggttaagccttccgctagcgttgatgtttctgcgtttactgcgcagcctatcaaggttgtgactcagcagcgcgtctcggacgagttcatgtgggctgacgccgattaccgtctcggtgtgttgcaggatctgatttccccagccctgggtgcttctattggtcgcgccgttgatcttattgctttccatggtgttgatccggctaccggtaagcctgccgcggctgtcaaggtatcgctggataagacgtcgaagacggttgatgccacagattctgccacgaccgatctggtcaaggctgtcggtttgatcgctggggctggtttgcaggttcctaacggtgtcgccttggatcctgctttctcgtttgcgctgtctaccgaggtgtatccgaaggggtctccgcttgccggtcagccgatgtatcctgccgccggtttcgcggggcttgataattggcgtggcctgaatgttggtgcttcttcgactgtttcgggtgccccggagatgtcgcctgcctctggtgttaaggctattgttggtgatttctctcgtgtccattggggtttccagcgtaacttcccgatcgagctgatcgagtatggcgatcctgatcagactggtcgcgaccttaagggccataacgaggttatggttcgcgctgaggcggttctgtatgtggctatcgagtcgcttgattcgtttgctgttgtgaaggagaaggctgcaccgaagcctaatccgcctgccgagaactgatttattgttgcggtgatgtgtacatgtgcagggggtggtgttgatgggtatcattttgaggcctgaggatattgagcctttcgccgatattcctaaagataagcttgaggcgatgatcgctgatgtggaggctgttgctgtcagtgtcgccccctgtatcgctaaaccggatttcaagtacaaggatgctgctcgggctattttgcgtagggcgttgttgcgctggaatgatactggcgtgtcggggcaggtgcagtatgagtctgcgggtccgttcgcccagactacacggtctaatacgcctacgaacttgttgtggccttctgagattgctgcgttgaagaagttgtgcgatgagagtggtggcgccggtaaagcgttcacgatcacacccacgatccgtggtggatatacacattctgaggtgtgttctaccgtgtggggtgagggttgttcgtgcggatctgatattaacggctacgatggccctttgtgggagatataggatgactggttttcctttcggtgagactgtggtgatgcttcaaccgactgttcgtgtcgatgatcttggcgacaaggtggaagactggtctaagcctgtcgagactgtgtaccataatgtggctatctatgcttccgtttcgcaggaggatgaggcggcaggccgtgactcggattgggagcattggacgctgctgttcaagcagcctgtcaagggtgccggttatcggtgtcgttggcgtattcggggtgttgtgtgggaggctgacgggtcgcctcttgtgtggcatcatccgatgtctggctgggatgctggtacgcaggttaatgtgaagcgtaagaagggctgataggtagtggctcagaatgtgaatgtgaagcttaatcttcctggtatccgtgaggtgctgaaagcgccgggtgtgcaagctatgttggctgagcgtggcgagcgtgtgcggcgtgccgccgcggcgaatgtgggcggtaacgctttcgatagggcccagtatcgtggtgggttgtcgtctgaggtgcaggttcaccgtgttgaggctgtggcgaggattggcaccacctataagggtggtaagcgtattgaggctaagcatggcacgttggcgaggtcgattggggctgcgtcgtgatcgtgtacggtgatcctcgcgtgtgggctaaacgcgtgctcaaggatgatggttggctgtcggatgtgccgtgtactgggactgttcctgaccggtttgagggtgacctgatttggttggctcttgatggtggcccggagttgcatgttcgtgagcgtgtttttttgcgtgtgaatgtgttttcggatatgccggatcgtgctatgtcgttggctcgccgggttgaggctgtgctgtctgacggggtggatggggatccggtggtgttttgtcggcgttctactggtcctgatttgttggtggatggtgcacgttttgatgtgtattcgttgtttgagctggtgtgccgtcctgtcgaatccgagtaaacgttttgttttgatattgttttaattgtttgtttgatattgtttttgggggttgtgatggctgctacacgtaaagcgtctaatgttcgctctgctgttacgggcgatgtctatattggtgccgctcatgctggtgacactattgatggtgttgggaagattcctgacggtcttaccgcactgggttatctgtcggatgacgggtttaagattaagcctgagcgtaaaactgatgatttgaaggcttggcagaatgcggatgttgttcgcactgttgccaccgagtcgtctatcgagatttctttccagctgatcgagtctaagaaggaggttatcgaactgttttggcagtcgaaggttactgccggagtcgattcgggttcgttcgatatttctcctggtgctacgacgggtgttcatgccctgttaatggatattgttgatggggatcaggttatccgctactatttccccgaggcggagcttgttgatcgtgacgagattaagggcaagaatggcgaggtttacgggtatggtgtgacgttgaaggcgtatcctgcccagattaataagaagggtgatgcggtgtctggtcgggggtggatgacggctttaaaagctgatactcccccggttcctccgaagcctcagccggatccgaatccgccgtccgataactgacacacattataagggattgttgatagatgagtgacacaggtttcacgttaaagattggtgaccgtagctgggtgttggcggatgcggaggagacggcgcaggctgttcctgcccgcgtgtttcgccgtgccgctaggattgcccagtcgggggagtctgcggatttcgcccaggttgaggtgatgttttctatgttggaggctgccgccccagaggatgctgtggaggccctggaggggcttcctatggtgcgtgtggccgagattttccgccagtggatggaatataagcctgacggtaaaggggcttccctgggggaataatttggctccacggcctgattgatgattatcgtggggccatcgaatacgattttcgcactaaatttggtgtttctgtttatagtgttggtggcccgcagatgtgttggggtgaggctgtccggctggctggcgtgttgtgtactgacacgtctagccagttggcggcccacgtgaatggttggcagcgcccgtttgagtggtgcgagtgggcggtgttggacatgttggatcattacaggtctgctaatagtgaggggcagccggagcctgtggcgaggcctactgatgagcgcagggcgaggtttacgtctgggcaggtggacgatattttggcgcgtgtccgcgctagtggcggggtgtctcgcgagattaatattatggggtgaatagtgtatgtctggtgagattgcttccgcatatgtgtcgttgtatacgaagatgcctggtttgaaatcggatgttggtaagcagctttccggggttatgcctgctgagggtcagcgttctggtggtttgtttgcttctgggatgaagttggcgcttggtggcgcggcgatgatgggtgccatcaatgttgctaagaagggtctcaggtctatctatgatgtgactattggtggcggtattgctagggctatggctatcgatgaggctcaggctaaactgactggtttgggtcacacgtcttcggatacgtcttcgattatgaattcggctattgaggctgtgactggtacgtcgtacgctttgggtgatgcggcgtctacggcggctgctttgtctgcttctggtgtgaagtctggcgggcagatgacggatgtgttgaagactgtcgcggatgtgtcttatatttctggtaagtcgtttcaggatacgggcgctattttcacgtcggttatggctcgcggtaagttgcagggcgatgacatgttgcagcttactatggctggtgtgcctgtgttgtctctgttggctaggcagacgggtaaaacgtcggctgaggtgtcgcagatggtgtcgaaggggcagattgattttgccacgtttgcggctgcgatgaagcttggtatgggtggtgctgcgcaggcgtctggtaagacgtttgagggcgctatgaagaatgttaagggtgccctgggttatcttggtgctacggctatggccccgtttcttaacggtttgcggcagatttttgttgcgttgaatccggttatcaagtctgtcactgattctgtgaagcctttgtttgcgtcggtggatcaggggattcagcgtgtgatgccgtctattttggcgtggattaatcgtatgcctggcatgatcacgagaatgaatgcacagatgcgcgccaaggtagagcagttgaagagcatttttgcgagaatgcatatacctgtcccaaaggtgaatttgggtgccatgtttgctggcggcaccgcggtgtttggtattgttgctgcgggtgtggggaagcttgttgcggggtttgccccgttggcggtgtcgttgaagaatctgttgccgtcgtttggtgctttgaagggtgccgctggcggtctgggcggcgtgtttcgcgccctgggtggccctgtcggtcttgtgatcggcttgtttgcggcaatgtttgccactaacgcccagttccgtgccgctgttatgcagcttgtgggtgttgtcggtcaagcccttggccagattatggcggctgtgcagccgctgtttggtttggttgcgggtgttgtggcacagttggctcccgtttttggccagattattggcatggttgccggtttggctgcccagcttgtgcctttgattagtatgcttgttgcccggctggttcctgtgatcacgcagattattggtgcggtgacgcaggttgctgccatgctgctgcctgcactgatgccggtgttgcaggctgtgatggctgtgatacggcaggttgttggtgtgatcatgcagctggtgcctgtgttgatgcctgtgattcagcaggttttgggtgctgtcatgtctgttctaccgccgattattggtttgattcggtcgctgataccggtgatcatgtctgttatgcgtgtagtaatgcaggttgttggtgccgtgttgcaggtggtggcccgtattatgccggttgtgatgccgattatgacggctgtgatcgggtttattgcacgtattcttggtgctgtcgtgtctgccgctgcacggattattggttctgtaactcgtgttatcgcctgggttgtgggccatttggtgtctggtgtggcgcgtatgggttcggctatcctgaatggctggaatcgtattagagcgtttacgtctgcgtttattaacggtttcaagtcgatcatttctggcggcgttaacgcggttgtgggggtttttgcgcggctgggttcttcggttgcctcccatgtgaggtctggttttaacgcggcccgtggtgctgtttcttccgccatgaatgggatccggggtgtggtgtcttcggtggcgtctgctgttggcgggttcttcggctcgatggcttctcgggttcgtggtgccgcctcgtccgggtttaacggggcacggagtgtggcttcttctgctatgcatgctatgggctcggctgtgtctagcggtgtgcatagtgtgctgggttttttccggaatctgcccggcaatattcggcatgctctcggtaatatggggtccctgttggtgtctgcgggccgtgacgtggtgtctggtttgggtaatgggatcaagaatgctttgagtggcttgttggatacggtgcgtaacatgggttcccaggtggctaacgcggcgaagtcggtgttgggtattcattccccgtctagggtgtttcgtgacgaggttggccgccaggttgttgctggtttggctgagggtataacaggtaacgcgggtttggcgttggatgctatgtctggtgtggctggaagtctgcctgacgctgttgatgcccggttcggtgtgcgatcgtctgtgggctcgtttaccccgtatggcaggtatcagcgtatgagcgataagagtgttgtggtgaatgtgaatgggccgacgtatggggatcctaacgagtttgcgaagcggattgagcggcagcagcgtgacgctttgaacgcgttggcttacatgtgatagggggtgtggttcatgtttcttcctgacccgtctgatcgtgccggtttgactgttacttggtctatgttgccgttgattggtaatgatccggagcgtgtgcttcatttgacggattatacaggtgcgtctcctgtcatgttgttgaatgattcgttgcgtggcctgggtgttcctgaggtggagcatttttctcaaactcatgttggggtgcacggctcggagtggcgcgggtttaatgtgaagcctcgcgaggtgacactaccggtgttggtgtcgggtgttgacccggatccggtgggcggttttcgtgacggttttttgaaagcctataacgagttgtggtctgcttttcccccgggcgaggtgggggagttgtcggttaaaaccccgtctggtcgtgagcgtgtgttgaagtgccggtttgattcggtggatgacacgtttacggttgatccggtgaacaggggttatgcgcgctatctgttgcatttgacggcctatgacccgttttggtatggggatgagcagaagtttcgttttagtaacgcgaagttgcaggattggttgggtggcggccctgtcggcgggaagggtaccgcttttccggtggtgttgacgcctggtgttggttcgggttgggataatctgtctaataagggtgatgtgcctgcgtggcctgtgattcgtgttgaggggcctttggattcgtggtctgtgcagattgatggtttgcgtgtgtcttcggactatcctgtcgatgagtatgattggattactattgatacggatcctcggaagcagtctgcgttgttgaacgggtttgaggatgtgatggatcgtctgtctgagtgggagtttgcgcctatcccgcctggcggttcgaagagtgtgaatattgagatggttggtttgggtgccattgttgtgtcggtgcagtacaggtttttgagggcttggtgaatagttgatggctggtcttgtcccgcagataacattgtttacgccagactatcgccgtgtggcgcctatcaatttttttgagtcgttgaagttgtcgttgaagtggaatggtttgtcgacgctggagttagtggtttcgggggatcattccaggcttgacgggttgacgaagccgggtgcacgcctggttgttgattatggtggtggccagattttttctgggcctgtgcgtaaggtgcatggtgttggtccttggcggtcttcccgtgtgactatcacgtgtgaggatgatatccgcctgttgtggcgtatgctgatgtggcctgtgaattatcgccccggtttagtgggttcggagtggcgtgctgacagggattatgcccactattctggtgcggcagagtcgattgctaagcaggtgttgggggataatgcttggcggtttccgcccggtttgtttatgatggatgatgagcgtcgtggccgttttattaaggattttcaggtgcggtttcacgtgtttgctgacaagttgttgccggtgttgtcgtgggctcggatgactgtttcggtgaaccagtttgagaatgcgaagtttgatcagcgtggtttagtgtttgattgtgtgccggcagttactcgtagccatgtgttgactgccgaatcggggtcgattgtgtcgtgggagtatgtgcgtgacgcccctaaggctacttcggtggttgtgggtggccgcggcgagggccgggatcggctgttttgtgaggatgttgattcgatggctgagggggactggtgggatcgggttgaggtgtttaaggatgcccgtaacactgattctgagaaggtgtctctcttcgatgaggctgagcgggtgttgtccgagtcgggggcctcgtcggggtttaagatcgagttggctgagtcggatgtgttgcgtttcgggccgggcaatctgatgccgggtgatcttatctatgtggatgtgggttctggtcctattgcggagattgttcggcagattgatgtggagtgcgattcgcctggtgacgggtggacgaaggtgacaccgattgcgggggattatgaggataatccgtcggcgttgctagcacggcgtgttgccggtttggctgccggtgtgcgggatttgcaaaaattctagttgattggggtttgttgtgggtattgtgtgcaagggttttgatggtgtgttgaccgagtatgattgggctcaaatgtctggtctgatgggtaatatgccgtcggtgaagggcccggatgattttcgtgtgggtacgacggttcagggtgccacggtgttgtgtgaggttctgccggggcaggcttgggctcacggtgtgatgtgcacgtcgaatagtgttgagacggtgacggggcagctgccggggccgggggagacccgctacgactatgtggtcctgtcgcgggattgggagcagaacacagcgaagttggagattgttcccggtggccgtgcggagcgtgcccgtgatgtgttgcgcgccgagcctggcgtgtttcatcagcaactgttggctactttggtggtgtcgtctaacgggttgcagcagcagttggataggcgtgctatagcggcccgtgtggcgtttggcgagtctgcggcgtgtgaccctacccctgtggagggtgaccgtgtgatggttccttcgggggctgtgtgggctaaccatgcgggcgagtgggtgcagttgtctccgcgtattgagacgggttcgaagtcgatcatgtttggtgggtctaacgtgtatgcttacacgatctcgtttggacgggagtttacgtctccgcctgttgtggtggcgtctatggggacggctgctggtggcaccacccagattgatgtgaaagcctacaatattactaccaaagattttggtttggcgtttatcacgaatgatggttcgaagccgaatggtgtgcccgcgattgcgaattggattgctgtcggcgtgtgactgtacaggtgttgtggcggatggtgtgatgttgggggggctgtggtgtcgtggtttactcctgcactggtggcctctatctgtaccgcgttggccactattttaggttctgttcaggcggtcacgtctaaatcgaggaagcgtttacggaggctgtctgcgcaggttgattcgatggaagagtatacgtggggtgtgcggcgtgaggttcgccggtttaacgctggtcttcctgatggggttgatccgcttgttttgcctgatccgcccggttttttgcaggattcattgggggggtgagtgatgagggagttggaggaagagaagcggcagcgccgcaattttgagaaggcttccctgctgttgttgttcctgtcacttgtactactggcggtggttgctgggggtgctttgcgtttcggatcggtgtcttctgagcgggattcggagcaggctagggccgagtctaatggtatagcggctaaaggtttagccagtcgtgtaaagcaggtgtgtacccagggtggtgtggagtctgttaagcttcaccgttctggtttgtgtgtggatgctgcccgcacggagcgtagcgtagcgggtgtgcagggtcctgccggtgagcgcggcccgcaagggcccgccggtgtggatgggcgtaatggtgttaacggttcggatgggcttgttggccctgttggtccgccgggttccccgggtttgaatggtgtgaacggtcctgacgggttgcctggggctaacgggtcggatggccgtgatggtgtccgtggtcttgcgggtgctgatggtaaagatggcgtgaaaggggatctgggcgatactggtcccgctggtgagcctggtgcgcccggttctgcgggttctgccggcacgcaaggtgcacagggtgaacggggtgagcgcggccctgccggtgtgaacggatctgatggtaaagatggtaaggatgggcgtgatggccgctcggtggtgtccgtgtactgttctggggggcgcctggttgtgaaatatagtgacggtgtggcttccacgatatcgggttcggtggcctgcgagagtgtgaaaccgtcgccggtggttaccgtgtcatcccgcaaatagcagaagaggaaagggtgttactggtgttgatgatgtttgggggtggtgtgcggtgagatacattccagcggcgcaccattctgccggttctaatcatccggtgaatagggttgtgattcatgcgacatgcccggatgtggggttcccgtccgcctcccgtaaagggcgggcggtgtctacagcaaactattttgcttccccatcgtctggcggttcggcgcattatgtgtgcgatattggggagactgtgcagtgcctgtccgagagcactattggctggcatgccccgccgaatccgcatagtttaggtattgagatttgcgcggatgggggttcgcacgcctcgttccgggtgccggggcatgcttacactcgggagcagtggcttgatcctagggtgtggcccgcggtggagcgggctgctgtgttgtgtcggcagttgtgtgacaaatataatgttccgaagaggaagcttagtgcagccgatttgaaggctggcaggcggggtgtttgcgggcatgtggatgttacggatgcgtggcatcagtcggatcatgacgatcccggcccgtggtttccgtgggacaggtttatggccgtagtcaacggcggtagtagtagtgatagtggggagttaactgtggctgatgtgaaagcgctgcatgatcagattaaacaattgtctgcgcagctcaccggttcggtgaataagctgcaccacgatgttggtgtggtacaggtgcagaatggtgatttgggtaaacgtgtcgatgctctgtcgtgggtgaagaatccggtgacggggaagctgtggcgcactaaggatgccctgtggagcatctggtattacgtgctggagtgtcgcagccggatcggcaagcttgaagccgatattgcccagttgaagaagtgatggtgatcgattgtgggtaaacagttttggttaggtttactggagcgggcggctaagacttttgtgcaaacgtttgttgctgtgcttggggtgactgcgggtgtgacttatactgcggagtcgtttcgcggtttgccgtgggagtctgccctgattacggccggggttgctgcggtgctgtcgattgctacctcgtttggtaacccgtcgtttgttgccggtaaaccgaaaacgacgcctgttgtggatgctgggcttgttccaccggatgatcctggaatagtggagtctcacatggttgacgaaacggatcctggcatgatcgagcctgtagacgatgctgatcttggtggctatgtgccgaagcgtgcagccgagtctgaggttggcacggtagagccgatcgaatgataagtgaatgtgtgtgtgccccagcggtgctgccacgattgtgtggtggttgctgctggggcactatttttgtgtctacaggggttttacaggttgtcgtctagggtgtcttcgagtgtctgttgtaggagtgcacactcggcgagggtgtcttcagcctggtcgacaatgttttgttttgctatgcctggatagttgttgcggtgattgtagatggcttccagaatgttgtctgccatgatttgtagtgttagggcctggttggtgatgcattccagctcgtctagggcggcctggctagcctccggctgccggttgtccggatgttctgcaaggttgcagtcccacaggatttcttggcatgcatccctggtgtctgcgtccacatcgatgtcgtctaggctgacaccgttggcgttgaggctgatgttgtcgaggttgatgggaaccagatattcgctgctgatgctgcaggtgatgtttgcgagttctgtcatgtttcgtggctgctgctgtatgatgcggcgggccgcggttttgagggctgtgactgttcggtgtctgttactgggcatcgtttctattcttcttccccggtgtagctggtggtgttggtgtactgggtgagtgtgatcaggcactggtcggcccactgtttcaccgtctgccgtgtcacacccaatcgttgggctgccaccgaataggtttgatcatacccgtagacttccctgaatgcggcaagccgtgctagccgtttccgctgttttgatggttcacatgtgagggtgtagtcgtcgatggccagttgtagatcgattatggttacaatgttgttgccgtgatgctggggggcggttggtggcggcggcattcccggttcgacggatggtttccatgggcctccgttccagatccattgggcggcttggataatgtcggctgtggtgtaggtttggttcacgggtcaccccctgaacaggtcgtcaaggctgttggtgttggtggtgtcgaatcgtcccacacagtggcagtagtcgtacatgagtttgataatgtgttggtggtcgcctaggtaggtgttgccgctgatactgtaggtggctgtgccgtctttgcttatggtgtatttggcggtgatggtttcgggtgtttctgtgttggtgatgatggctgtggtggtggagcctactgtttgtagcctggtggtttgggttccgtcgtcgaggatggtagtaaccattatggggttctccttttagttgctggtttggttgtcggctaggtgaataatatcggataaaggtttcggctggtctaggtgttgtatagttttgttggctagccgtttggctaccctgtaacacattttggtatagtgtttgttgtctaggttgtggtattgttcccgcaccgcaatatatagtagggagtcttggtacaggtcgtctgcactgattgcggggtagtgtgcggctgttttggtgcatgcccggttgagtgtgtgtagatgctggtttgtggcccatccccacgatgctgtggtggccaggtctgcttttgttggtcgtctactcatggcactatttcatctcgctatctgatagttgtttggtgttttgttgttgatagtgtagcacacgagtccggggtggccggtggtgcctgtgcggtgccggaaccatgtggattcgccttccatggatgggcattggatgaaggtgcgttgtccttgctcagagatttctaggtggtgccggtgcccggccatgaggatgtgggatgtggtgccgttgtggaattcttggccgcgccaccattcgtagtgttggttgttgcgccattggtgtccgtgggcgtgtaggatttgtgtgcctgccacgtcgacggtggtggtcatttcgtcccgctcagggaagtggaagtggatgttgggatactggttggtgagctggtaggcttctgcgatggcccggcagcagtccacatcgaatgaatcgtcgtaggtggtgactcctttgccgaatcgtactgcctcaccatggttgccggggatggatgtgatggtgacgttggcgcagtggtcgaacatgtggacgagttgcatcatggccatgcgggtgagcctgatttgttccgtcaagggtgtttgtgttcgccaggcgttgttgcctccttgtgacacgtatccttcgatcatgtcgccgaggaaggcgatgtggacccgttgcggttttcctgcttgctgccagtagtgtttagcggcggtgagggaccggaggtagtcgtcggcgaagcggctggtttctccgccggggatgcctttgccgatttggaagtctcctgccccgatcacgaacgcaacattactatctgttgtgctactggtggcgggttttgggggctgccagtcggctagcttagctacgagttcatccacgggataggggtctgttttgggttggtggtcaataattttttgtatggatcggcctgtttctccgttggggagtgtccattcggagatgcgtgtgcgccgtacggtgccgttggctagattgtcgtcgatggtatctgcttcgttgttgtggttggctagctgtgtgaggagccggtcaatattgtctatcactggttttcctcctcctcgttctgggtggtgttggtttgtttgcggcgatagtctttaatgacggtggcggagatggggtatccggcttgggtgagctgttttgctagccatgaggcggggatggttttgtctgcgagcacgtcggcagctttgttgccgtagcgttgaataagggtttcagttttggttgccatgatatcccatcggttgtgtggcgggctgccatcctgtgcggcagtcgccgtcgtgtcctggtttgcgtgtgcaccatgtggtagcaccgtcctggtggtggattgttttgccgcacatgacgtcccggagatgctcaggcagtgcgccgtcatcctggttgctggtttgtgtgtcgaagagtgttttctggttggtgaaatgctcggatacggtgccgttgtgtacgggtagtatccatgttttccattgctgctgtagccgagtgttccagtggaattgtttggctgcgttttcggcctgttttaaggttttgtagtagccgacgagtatgcgctgatgctgctgatcgggaggattttggcctcgccaatattgtgccgccacggcgtagcggttactgtctgtgaaggtgttccaacagtattcgataatgttgttgagtgtgtcgtctataacatctgtgtcgctgttgggtaattcttgggcgatgatgtcgcggatggcttgccggtttcgggtggtgggtttgaacgagatgctcacgatagtaccggctggtcgtcttgcatgaactggttgaaggagccgtctccagcatgtcgtgcctgtgtgatgtcctggtcggtccagtcggggtgctgctgtttcagatagtgccagcggcaggcgtcataggtttcgttttggagccgagtgagatggttttctgtgatgatgtgtttccacattgtccacgagacgtcgagtctgcggagcatgtccatggccggcacattaaacgagttaaggaagagtatttcgtgggtgtagtattccttctcgtactggtcccatccgcttcggtgtctgttgggctggtttttggggtaggcttcccggcatactttgtgcaaacgtttggccatgtctttgggtagcctcatgtcggggttggcgcggatcatggatcgcatcccatcataggtggtgccccaggtgtgcatgatatgtagtgggtcttcaccgtctgcccatttttctgcacagatggcgaggcggatgcgcctccgggctgcttggctggtgttgcgccggttggggatggggcacgtgtcgagaggatccatgatgtttcatatgcctttctttgtttgggttgcttgtgtggttttactgtagcacagtgttgagtgcttgtgtcaaccctgttttgccggcttgcaggtaggtgtctgtgacatccccaactgtgaggggcacatgggtggcttgggggagtgccgcctggagggtttgggccatctggtctcccgccttgtctgggtcggaccatatgtagatgtggtcgtagccttcaaaaaatttggtccaaaaagtttgccacgaggtggctccggggattgcgacggccgaccatccgcattgttcaaggatcatggagtcgaattcgccttcgcaaatgtgcatgtctgtttgcgggttggccatggcggccatgttgtagatggagcctgtgtctccggccggtgtcaaatatttggggtggttgtgggttttgcagtcgtgcgggagtgagcagcggaaacgcatttttcgtatctcggctggccgcccccaaacggggtacatgtatgggatggtgatgcactggttgtagtcttcgtggccgggtatggggtcattgtcgatgtatccaaggtggtggtagcgggctgtttcttcgctgattcctcttgcggagagcaggtcgagaatgttttcgaggtgggtttcgtagagggccgaggctttctggattcggcggcgttccgcaatgttgtatgggcgtatgctgtcgtacattcgggtttctttcttctagatattgttgtagcttgtggagtccgcctccgacaccgcatgtgtggcagtaccagactcctttgtcgaggttgatgctcatggagggctggtggtcgtcgtggagtgggcagaggatgtgctgctcgttcctggacgggttgtaccgtatgcgatattggtcgaggaggcggcatgtgtcagaggtgtgggaggagctcgttgagggttgataccacataggcttcactccatggcttgttgcgctgtttcatcactacgaggccgatagtggactggctggttttgtttcggtgtgtttcatagttccttgcctctcggctggcttgtttcacgaattcggcgaggtgtggctgtccggctttcgcctcgataatgtaggttttgttgccggtttggaggatgaggtcgccttcgtcttcgcgcccgttgaggtgaagccgctcgatattgtgtccggtgtcgcgtagctggtggaggagtctcgtttcccattcggcaccggcccgccggttgcgtgcctgctgtgaagccatcatagtcctttgtgtgttgtggtcatgttccatggctgtttttcggcgaggggcccgaagaatgtgtattcggggtaggctcgcagccgctcgtatcgggtgccgtcggggctggatttgcctgtgcgctgtttcaacacggcgatgcgggcctcggccggtatcgatagtccgttgccgttatcctcaccaccgtaaagtgatactcccaatatgagttgcggtttttcggagaggccgtttttgatttccctccgggctggcgggtgttcaatgtcggttccggttttgtcggttgcgtggtgggtgacaataatggtggatcctgtgtctcgaccgagggctgtgatccattgcatggcttcctgctgggcctggtagtcggattcgcagtcttgaatgtccatcaggttgtcgataacaatgatggggggaaagtggttccacatttccatgtaggcttgcaactccatggtgatgtctgtccatgtgatgggtgactggaatgagaatgtgatgtgttggccgtggtggatgctgtctcggtagtattctggcccgtagttgtcgatgttgtgttgtatctgggcggtggtgtgttgggtgttgagtgagatgattcgtgtggaggcctcccagggtgtcatgtcccctgatatgtagagggcgggctggttgagcattgcggtgatgaacattgctagcccggatttttggctgccggagcgccccgcaatcatgacgagatcccctttgtggatgtgcatgtccaggttgcggtagaggggttctagttgtggtatgcggggcagctcagctgcggtttgggaggctctctcgaaggatcgttgtagagagagcatcggagcctttatctatctgttacggttgaaggatatatgggtggtcagatggagtcgatgtctacatcgtcgcttccgccagtgttgggtttgctgtctcgcttgtcaacgtaggctgctacgaggtcgtagatggcatcatctaatggtttgaggatgacggcgttgaaaccgtttttggtgcgcactgtggcgagtttgaaggcctgctcctcgccaaggtaggtttcgagttcgcggatcatggagtgtgggcgatcattgttgccgcgcgctttctcaataatagcgttggggatggtttctggggtgccgttgttgagatcctggagtgtgtggaagatagtaacgtcggcgtaaatacggtctgcgacctgtccgccgtatccttcggtgttgtgctcgacgtcgtggactttgaaggcgatggcggtggcgtcctggtttttggaggggttgaagaaggtgctgtcgttgttgttgcggtagtttgcgagtcccattgttgtttcctttactgttttgttggtttgtgtcggtttttatcgggtgaggctgtttcgtttgctgcggaacgcctctgacacgtcggggttactggtgatggtctttttgtactgtttgagtagatcggctagctgtgccttgctggtggctttgttgattttgtcgatgacgatgtcgttttcttgggatgtgatgttgtctacatagtttttggctgcctggttgtatcggtcttggagaatgattgatgcggaggctgtgagggttgccaaatcccagtctttggacacgtcatcgtttttgaggcctccgaggaggtcgatgatggcctgtttggcctgattggctgtgtctcctcggattacagcccacggtgcggcatagtctccaccgtatttgagtgtgatggtgatgcgatcatcaccggtgttggtgtcggtcactggttctccttgccttcctcgagtggtgtgatggtggtttggatcgggtacctgtaggcgtctttcccgtctatagcccagcaggcgtcccgtacggggcatcctttacacagggctgtgacgtgtggaacgaagatgccttgactgattcctttcattgcttgactgtacatggatgatacatgccggtgggtgttgttgtcaagatcgtagagttcggtggctgtgccctgctcgactgatagctgatcattcttagtggtggcgggtgtccaaaacatgcctttcgtcacatggatgccccgctgttcgagcatgtaccggtatgtgtgcaactgcatagcatcgactggcaggcgacccgttttgaggtcgaggataaacgtttcgccggtgtctgtgtcggtgaagacacggtcgatgtagccgacaatctttgtgccatcctggagggcggtttctaccgggtattcgattcctggtttaccgtctaggattgcggtgatgtattctgggtggtttcgcctccatgttttccagcggtcgacgaagatggggccatagtgcatccaccaatcatagtttttcttgttgggtcctccgctttcgcacatgtttttgcacactctgccagagggtttaatctcagtgccctcggactgagcgaaggctacctgtgtgtcgaaaacattgttgaaggatagaaggttgtcgggtatttcgggatattctgcagggttgtgcaggtggaggtcgtattgttcggtgatgtggtggatcgcactgccggcgatggtggcataccaggtgtgataggtggccttgtagccgtgggagaggcgccatttttctccacattcggcccactgcgatagggagctgtaggagatgtggcctgggtggttgatggttttcgggtattgtgctagaggcattacttgtcgcttttattccatgggttgcgggtgtcttggccggcgtcatgctgctggtatgcgaggagtgtcaggcagtgccaggcggcatgtgccagatgcggcaggtgtgattcatcgtcgagattgtttccttgctgccaggctagcaggtgcctgtagagggcgtcaatactgtgacaccaggggtatcctccggtccagttgttgtctccgtatttggtggcaccgtatccggcaacctcacctaaagcatggagggatgcggggtcgatgagggagagccggcatagtttgagttcttttcgggcgcccgtgttggggtcggtgtacatgcgggtgggctcatccatggggtgtgtgctccttaagggtgggttactggtttttgtcgtgggcgagtgctacggcgagaataatgatggcgagggtttcagcgatcaggatgggtgttgtgatcatttgtggtctttgggctggtaggtgagtgttgatgcacccaggagggtggctagggcgcatgcggcaatgatggcgagggcggctttgtggctggtgcctgttgcgtacatccatgtgataataccgccttggatccaggccaggctggtgaagaacgtttcgtagctgtgcaactcgatacggttgggtgtgttcatgcttgctcctgaagaatggtgttgatggttttataaatgttgtacaggtcggtttcgatagataacagttggtggatttcgtggtcgagattgatgtctgggttgagggtgttgatgcgggatgcaatatcggtggctgtgcgtagtgtgccgccggtgtggtgaataatgtgtgccgtgtcggcgagtccggtggtgacagcgtagtgggagaggagaggcatagcggggatgctccttggctggttactgttgcgggttgatgttgaggtcggtgacgttggggtggtcttctgttcctgtgatgaggcagtggacggtgacgggtagtttggatgcgccgggctgtttcatggttgcgccgtagacgatgctgaacgtgtctttgccaataattttgtggagttgtaggtcgatgtcggggttgccgttccatttgataccgtgtgcggcggccttctgctcagccttgtcattgcaggtgtgggctgccgtaatcatggtgagtccggttgcggtttcttcaccccttgcttgggcttgcttgtgggttttgtcctgctcggcttgtagggatcgggtggcttcagcctgcttggcggctttctcggctttgcgctgctgggcggtttcaggtgtccatgcagtgtttgctgtggtgacctgtggggccggctgtgatgcgagtggcgggttgtcgtcgggggctggtaggaaggaggctgcggcaataatggcggctgtgattccagcgatggtgtagccgtttttcttgttcatgattttgtattcccctttccggggtgttgttcgttgctgacatgattgatacttccagactggactatgactgtcaaagtgtcgctcagtttgtgtgagcgatccttgtggggtgagggggttttatcgggcgaacagagttaacaggtggccgatgttgatgcggctcacattccagtagagttgtgtggcttcaccgctggtgagcggcttccacgtgtcatggctgtacacggtaccgtcggatgcgatgaatgtgttggggcgtagcttgtgaagttcagtctctacgctctgccggtaggcttcggcgaggccctcaaaatccaggtggtcgcaggcgaggttttcaaggcgtgtcaggtcgaaaggtgtggggcagtcgtagctggcgggggcgtagagctgggtgaaatggtttgcgatcttttgcatcatgattccttttctcgtgtgatgggttgatagttttatcgtgtagcttcggcgaggatgacgtctacatcgatcacgtcgatcatgtcgtggagttcctcagcttcgtcctcagataggtggcgccagtcgtagtcgccgtacacggcgccgtcgagggtgacagtccacaggggccggatgagccgtatggcttcttcgactttggcgtggtacatgcggcgcaccctatccagatccatgtcgtctgactggtttccggtgaggctgtggaggctgagtgggttgatttctgtctgcccgtagaggctggtgaaggatggtgtgatgagtgtgccatccatgaggggatgctcctttcggtggtggaggggttgttgtggtttctagagtgtgcgggctgcgactccatagtcaaggtggcactcattcggattgagcgtttcatgctggagtgttgggtgtgacagatgtcacttgagcctttattgcctctctcggcgtctcaaatcttctgggggtaggattatgcagggttgaccctgctagtcgattctagggcccttctagggcgtctcaagggtatgtctgggttgtagcgagtgttgcagatgatctagcaggtcgagataggtctgtctcgcaggggtgggggtgccctaattgggcatggcatctaatccccagagtgtgtgagataggccacatctccctagcttgatacgtatcctcgaagctactctgccgatctggcgtagagggtgtagcccagaaatgccgtttaaagcatcagcatggcgcccaggagcgccttacagggtgggggctaggtatttatacccccagcacattctgatcgattctagacgcataccggagccttgtgcgagatcagctctccggacgcagatcatcagcccctatcctgcttagctaagcctgcactatgtggacagcgtgggatgctaaggggggaaggacacggtaaaaagaagaggggggagcatcagccttcacgtcttaggtactgaagttcaccttagggtcttagcacttagcaccgagccccttgaggggctcggcatcagcccgagccggctcagctcatcaggcacagccctgaaaagggtacacgccatcaggggaagtcttgagagtacgaggagcctcagcgacgagtactcgaaagcctgagggaacaccctgagcgctgatgggcctagcgtgttcggaaaagacacaagagtgaagtgtgacagctgtccgggagtgaaacccgttctggctaggggttttagtcttaaacacccgtaaaggttacaagactctaagaaaatttaaggaaaagtttaggttttatttttggacctttactaccaaaaacacccgtttacaccccctcaaacccgccaatagagccaaacagtcatgtttggctcatcccaggtggcgtatgctaggctggacaggtagccagctggacgcaaggccgaaatccgctgacgcggctttcacccttacatccatcagtctacaaaacacttaaagaccttaagagctaagcgctcaggtgctgatagcttagcaccgagcccctcaagggctcggcatcagtcttaggtactttagataactttaaaacattcaaggcttagcccttaaagttataaataaactttaaagctttaaagtcttaaagtacatataaaaccttaagacttaaacagctaagttaactataaggccttaaagacttagcacttaaggatataaacttaacatcagtatttataacttataagccttaatactttaaataactataagatcttaaaggcttaaacacttaaagtaactagaagactttaaaatcttaagtacttaaagttaaccatcagtcttaaactttaatactataacctataagtcttaaagcttataggtataataatataactatataagtattaaggcttataagttataaaagttttagaagagctaaggggttaacttctttacttctctactctctttggtactttctctcttctcttcttttcttcatcaggggagaaggggaacctttaccatcaacgccgatgggcttttcgccgtgtgactcgtgtgcttggtcgcaagctcccatcgcacactccccacactcttacacccgtatccctttacagctttgtgtgttcggctgaaggcgtacggcgtgtcacgcttaaacccttaacacccggtaagacttaaagtgtatattatatgtagaagattttaaaaactttaagggtgtacacgttttggctgtgtcctacaccgctaggcgctaagcctggaagtgctaacacacactcacccccatttttcttccgtgttcttctctttttgacacagctggggggcgatgtgatctttctcacacccgtgggggtagtggagaaaacaaacaccccgccacgatcacaacaccccctcaaactaacaaaacagcccccagaatcgaacagcagggcaatggcaaggtattcatacccccaacggtttccaagtcctcagagaggcaatgagagcccatagaggcgtggtagacgatcgggaggcgatatggcacacaccaaccgcaccgcatcctccgcacaccggcgctggcggcaacaactcatcaccaaagcccgacaacaaggccaaaccgaatgccccttatgtggagtcaccctcacctgggacacccaccagctgccaaccagccccgaagccgaccacatcacacccgtcagccggggaggactcaacaccctagacaacgggcaaatcatctgcagaacatgcaacagaagcaaaggcaacagaacacaaccaaacatcaaactccaacaacaaaccacaaaaacactcgtcatctggtaaaaaacccgccaacccccaccggggacaccccctgcacaggcgtgcaagacc

SEQ ID NO: 38 - DNA, 29511 bp, unidentified
  source 1..29511: mol_type = unassigned DNA; note = Bacteriophage of P. acnes
agtgaaatacctcccctttgttgttttatcgttttgtcgactttttgtttggtggtgatggtggtgcagcctgagcttcccgagtctcgtgagtggtgtgaggagacgcgtcgttggtggcgtgtgtggggtgaggatgcgcgtgctgggtttgtgtctgatgaggagtggctgtttctcatggatgctgcggtgattcatgatgtggtgtggcgtgagggtcgcgcggaccttgtggcttcgcttcgtgctcatgtgaaggcgtttatgggcatgttggatcggtattcggttgatgtggcgtctggtggtagtggcgggggttctgcggtggcgatgattgacaggtatcggaagcgcaagggggcctgattaggtgtctggtgtggttggttctcaggttcctcgtcatcgtgtggcggcggcgtattcggtgtctgctggtggggatgctggtgagcttggtagggcgtatgggttgtcgcctgatccgtggcagcagcaggtgttggatgattggcttgctgttgggacgaatggccgtttggcgtctggtgtgtgtggggtgtttgtgcctcggcagaatggcaagaatgctattttggagattgtggagttgtttaaggcgactattcagggtcgccggattttgcatacggctcacgagttgaagtcggctcgtaaggcgtttatgcggcttcgatcgttttttgagaatgagcggcagtttcctgacttgtatcgtatggtgaagtcgattcgtgcaacgaatggtcaggaggctattgtgttgcatcatccggattgtgccacgtttgagcgtaagtgtggctgtccgggttggggttcggttgagtttgtggctcgtagccgggggtctgctcgcgggtttaccgttgatgatttggtgtgtgatgaggctcaggagttgtcggatgagcagttggaggctttgcttcctacagtgagcgctgccccgtctggggatcctcagcagatttttttgggtaccccgccggggccattggctgatgggtctgtggtgttacgtttgcgtgggcaggcgcttggtggcggtaaacgtatcgcgtggactgagttttcgattccggacgagacggatccggaggatttgtctcggtcgtggcggaagcttgctggggatactaatcctgcgcttggtaggcgtctgaattttggtaccgtgtctgatgagcatgagtctatgtctgctgccgggtttgctcgtgagaggcttggttggtgggatcgtggccagtctgctgtgtcggtgattcctgccgataagtgggcgctatcggcggttgatgaggtgcatctttctggtgggaaagtgtttggggtttcgttttctcgttctggtaatagggttgctttggcgggtgctggcagggcggatgctggggttcatgttgaggttattgatggcttgtcggggacgattgttgatggtgtaggccaactggctgattggctggcgttgcgttggggtgacacggaaaagattatggttgccggttctggtgcggtgcttttacagaaggctttgactgatcgtggtgtgccgggtcggggcgtgattgtggccgataccggtgtttatgttgaggcgtgccaagcttttctggagggtgtgcgttcgggtgttgtttctcatccccgtgctgattctcgccgtgacatgttggagattgctgtgaggtcggcggttcagaagcgtaagggatctgcttggggctggggctcgacgtttaaagacggcagtgaggttcctttggaggctgtgtcgctggcgtatcttggtgtgaagatggcgaaggctaagcggcgtgagcgtagtggtaggaagcgggtgtctgtggtatgaacgtggacgagttggctcttattgagggcatgtacgatcgtattaagaggttgtcttcgtggcattgccgtattgagggctactatgagggttcgaatcgtgtccgtgatttgggggttgctattcctcctgagttgcagcgtgtgcagacggtggtgtcgtggcctgggatagcggtggatgctttggaggagcgtctggattggcttggctggactaatggtgacggctacggtttggatggtgtgtattctgcgaatcggcttgctacggcgtcgtgtgatgtgcatttggatgcgctgatttttggtttgtcgtttgtggctgttattccccaagaggatgggtcggtgttggttcgtccgcagtcaccaaagaattgcaccggaaagttttcggctgacgggtcgcgtcttgatgctggcctggtggtgcagcagacgtgtgatcctgaggttgttgaggcggagcttttgcttcctgatgtgattgttcaggttgagcggcgggggtctcgtgagtgggtcgaggtgggccgtataccgaatgtgttgggtgcggttcctttggtgccgattgtgaatcggcgcaggacgtctcgtattgatgggcgctccgagattacgaggtctattcgtgcttacacggatgaagcggttcgcacgctgcttgggcagtctgtgaatcgtgatttctatgcttacccgcagcgctgggttacgggtgtttctgcggacgagttttctcagcctggctgggtgttgtctatggcttctgtgtgggctgtggataaggacgatgacggtgatactccgaatgttgggtcgtttcctgttaatagtcctaccccttattctgatcagatgcggctattagcccagttgactgctggggaggctgcggtgcctgagcgctatttcgggtttatcacgtctaacccgccgtcgggtgaggcgcttgcggcggaggagtctcgactggttaagcgtgctgagcggcgtcaaacatcgtttggtcagggctggctgtcggttggttttctggctgcgaaggcgttggattctcgcgtggatgaggctgcttttttcggtgatgtgggtttgaggtggcgtgacgcgtcaaccccgactcgggcggctacggcggatgctgtgacgaagcttgtgggtgccggtattttgcctgctgattctcggacggtgttggagatgttgggtttggatgatgtgcaggttgaggctgtgatgcggcatcgcgccgaatctgcggatccgttggctgcgttggctggggctatttctcgtcaaactggcgaggtttgatggatggcttcgggtgtgatgtcgaggctggcggcgactgagtatcagcgtgaggcggtccggtttgccgggaagtatgcgggctattatgccgagcttggtcgtttgtggcattccggaaaaatgagtgacacgcagtatgtgcgtttgtgtgtcgagttggagcgtgccggccatgatggttcggcgtcgttggcggcaaggtttgtgtcggattttcgccggttgaatggtgtggatcctggtttgattgtgtatgacgagtttgatgctgctgctgcgttggcccggtcgattgcgaccacgaagattttgaagggtgatccggatagggcgaatgatactattgatgcgatggcggcgggttttgatcgggctgtgttgaatgctggccgtgacacggttgagtggtcggcgggtgcgcagggccggtcgtggcgtcgtgtcacggatggtgatccgtgtgctttttgtgcgatgcttgcaaccaggtcggattatacgactcgggagcgtgcgctaaccgtggggcatactcggcgtcataggcggggtggtaagcgtccgctgggttcgaagtatcatgatcattgtgggtgtacggtggttgaggttgttgggcgttgggagcccagttccgcggacaccgcatatcagcgggtttatgagaaggctcgtgagtgggttgatgatcatgggttgcagcagtcgcctggcaatattttgaaggctatgcgtactgttggcgatatgagatgattgatatggtttccggttgtgcgccgccggttatcggtgcacgtggttgtctcccgcacggggggcggcaagattgtgttgttttccgcaaggagtgtagggttaggctatggccgatcagaatgttgaagaacaaaacgtcgacaaagtagaagaggttcccgaaaagggtgacgttgttgacgtcgtaaaggatgatcaaagcgggcagacaggcgatcagtcgaagcatgatggtggagataagccgtctgggactgattggaaggctgaggctcgtaagtgggagtctcgtgctaaaagtaatttcgccgagttggagaagcttcgcgcctcggatggtgatgcggggtctactattgatgagcttcgccgtaagaatgaggagctcgaagaccggattaatgggtttgttcttgagggtgtgaagcgcgaggtggctgccgagtgtggcctttcggccgatgcggtagcttttctgtctggcggtgatcgcgagtcgcttgccgagtctgctaaagcccttaaggggctgattgaccatagtggtagtggtggcgcgggtgtgcgccgtcttgcggggagtgcccccgtggatgatgttaaacgacgtgagggtgtcgcgtttgtggatgctcttgtcaataattctaggagatgatttatcatggctgacgattttctttctgcagggaagcttgagcttcctggttctatgattggtgcggtgcgtgaccgtgctatcgattctggtgttttggcgaagctttcgccggagcagccgactattttcggacctgtgaagggtgccgtgttttcgggtgttcctcgcgccaagattgttggtgagggcgaggttaagccttccgctagcgttgatgtttccgcgtttactgcgcagcctatcaaggttgtgactcagcagcgtgtctcggacgagtttatgtgggctgacgccgattaccgtctgggtgtgcttcaggatctgatttcgcctgctctgggtgcttctattggtcgcgctgtggatcttattgctttccatggtgttgatccggctacaggtaagccggctgctgctgttaaggtgtcgctggataagacgtcgaagacggttgatgccacggattctgccacgaccgatctggtcaaagcggtagggctgattgcgggtgctggtttgcaggttcctaacggtgtcgccctggatccggcgttctcgtttgcgctgtctaccgaggtgtacccgaaggggtctccgcttgccggtcagccgatgtatcctgccgccggtttcgctgggcttgataattggcgtggacttaatgttggtgcttcttcgactgtttcgggtgccccggagatgtcgcctgcctcgggtgttaaggctattgttggtgatttctctcgtgttcattgggggttccagcgtaacttcccgatcgagctgatcgagtatggcgatccggatcagactgggcgtgatcttaagggccataatgaggttatggttcgtgctgaggctgtgctgtatgtggctatcgagtctctggattcgtttgctgttgtgaaggagaaggctgcaccgaagcctaatcctccggccggtaactgatttattgtagcggtgatatgtatatgtgcagggggtggtgttgatgggtatcattttgaggcctgaggatattgagcctttcgccgatattcctaaagataagcttgaggcgatgatcgctgatgtggaggctgttgctgtcagtgtcgccccctgtatcgctaaaccggacttcaaatacaaggatgctgccaaggctattctgcgtcgtgctttgttgcgctggaatgatactggcgtgtcggggcaggtgcagtacgagtctgcgggaccgtttgcccagactacacggtctaatacgcctacgaatttgttgtggccttctgagattgctgcgttgaagaagctgtgtgagggtgacggtggggctggtaaagcgttcacgatcacacccacgatccgtggcggatatgcacattctgaggtgtgttctactgtgtggggtgagggctgttcgtgcgggtcgaatattaacggctacgctggccctttgtgggagatatgatatgattaattttccttacggtgaaacggttgtgatgcttcagccgactgttcgtgtcgatgatcttggcgacagggttgaggattggggccatcctgtagaaaccgtgtaccataatgtggccatctatgcttctgtgtcacaggaggatgaggctgccggccgtgacactgattgggagcattggtcgatgctgttcaagcagcctgtcaagggtgccgattatcggtgtcgttggcgtattcggggtgttgtgtgggaggctgacgggtctcctatggtgtggcatcacccaatgtctggctgggatgctggtacgcaggttaatgtgaagcgtaaaaagggctgatggttgtggcacgtgatgtgaatgtgaagcttaacttgccgggtattcgtgaggtgttgaagtcttctggggtgcagggcatgttggctgagcgtggcgagagggtcaagcatgcggcctctgctaatgtgggtggtaatgcttttgataaggcccagtatcgtgccgggttgtcgtctgaggtgcaggttcaccgtgttgaggctgtggctaggattggcaccacctataagggtggtaagcgtattgaggcgaagcatggcacgttggctaggtcgattggggctgcgtcgtgatcgtttacggtgatcctcgtgtgtgggctaaacgtgtgctcaaggatgatggctggctgtctgatataccgtgcacgggtactgtgccggatcaatttgagggtgacctgatttggcttgcgttggatggtggcccccagttgcatgttcgtgagcgtgtttttcttcgcgtgaatgtgttttcggatattccggatcgtgctatgtcgttggcgcgtcgtgttgaggctgtgctggctgatggtgttgatggtgatccggtggtgttttgtaggcgttctactggtcctgatttgttggttgatggtgcacgttttgatgtgtattcgctgtttgagctagtgtgccgtcctgtcgaatccgagtaaacgtatttgttttctatattttgtttttgtttgattatttttgggggttgtgatggctgctacacgtaaagcgtctaatgttcgctctgctgttaccggtgacgtctatattggtgccgctcacgccggtgacactattgatggtgttgggaagattcctgacggtcttaccgctttagggtacctgtcggatgacgggtttaagattaagcctgagcgtaaaacggatgatttgaaggcttggcagaatgcggatgttgttcgcaccgtggctacagagtcgtctatcgagatttctttccagctgatcgagtccaagaaggaggttatcgaactgttttggcagtcgaaggttactgccggagtcgattcgggttcgttcgatatttctcctggtgctacgaccggtgttcatgccctgttgatggatattgttgatggcgatcaggttatccgctactatttccctgaagctgagcttgtcgatcgtgacgagatcaagggtaagaatggcgaggtgtatgggtatggtgtcacactgaaggcgtatcctgcccagattaataagaagggtgatgcggtgtctggtcgggggtggatgacggctttaaaagctgatactcctccggttcctccgaagcctccgaagcctgagccggatcctaatccgccagccgagaactgatacatatttttgagggattgttgatagatgagtgacacaggtttcacgttgaagattggtgaccgtagttgggtgttggctgatgcagaggagacggcgcaggctgttcctgcccgtgtttttcgccgtgccgctaagattgcccagtcgggggagtctgctgatttcgcccaggttgaggtgatgttttctatgttggaggctgccgccccagcggatgctgtagaagcgcttgagggcttgcctatggtgcgtgttgccgagattttccgtgagtggatggaatacaagcctgacggtaagggtgcctctttgggggaatagtttggctccacggcctgattgatgattatcgtggggccatcgaatatgattggaggacccggttcggttgctctgtttatgatgttggtggcccggtgatgtgttggggtgaggctgtccggctggctggcgtgttgtgtactgatacgtcgagccagttggcagcccatctgaatggttggcagcgcccgtttgaatggtcggagtgggcggtgttggatatgttggatcattacaggtctgctaatagtgaggggcagccggagcctgtggcgaggccgacggatgagcgtcgggctaggtttacgtcgtctcaggtggacgatattttggcgcgtgttcgtgtcggtggcggggtgtctcgcgagattaatattatggggtgaatagtgtatgtctggtgagattgcttccgcctatgtgtcgttgtatacgaagatgcccggtttgaaggctgatgttggtaaacagttgtcgggtgtgatgcctgctgagggtcagcgttcgggtagtctttttgcttccggtatgaagttggctttgggtggcgcggcgatgatgggtgccatcaatgttgccaagaagggcctgaaatcgatttatgatgtgactattggtggcggtattgctagggcgatggctatcgatgaggctcaggctaaactgactggtttgggtcacacgtcttctgacacgtcttcgattatgaattcggctattgaagctgttactggtacgtcgtatgcgctgggtgatgcggcttctactgcggctgctttgtctgcttctggtgtgaagtctggcgggcagatgactgacgtgttgaagactgtcgccgatgtgtcttatatttctggcaagtcgtttcaggatacgggcgctattttcacgtcggttatggctcgcggcaagctgcagggcgatgacatgttgcagcttactatggctggtgttccggtgttgtctttgcttgcgaagcagacgggtaaaacgtcggctgaggtgtcgcagatggtgtcgaaggggcagattgattttgccacgtttgcggctgcgatgaagcttggcatgggtggtgctgctcaggcgtctggtcagacgtttgagggcgctatgaagaatgttaagggcgctttgggctatcttggtgctacggctatggccccgtttttgaatgggttgcggcagatttttgttgcgttgaatccggttatcaagtcggtcacggattctgtgaagcccctgtttgcgtcggtggatcaggggattcagcgggtgatgccgtctattttggcgtggattaatcgtatgccgggcatgattacgagaatgaatgcacagatgcgcgccaaggtggagcagttgaagggcatttttgcgagaatgcatttgcctgtccctaaggtgaatttgggtgccatgtttgctggcggcaccgcagtgtttggtattgtggctgccggtgtggggaagcttgttgcggggtttgccccgttggcggtgtcgttgaagaatttgttgccgtcgtttggtgctttgaagggtgccgctggcgggcttggcggcgtgttccgtgccctgggtggccctgtcgggattgtgatcggcttgtttgctgccatgtttgcgacgaatgtccagttccgtgcctctgtgatgcagcttgtgggtgttgtcggtcaggcgttggggcagattatggctgctgtgcagccgctgtttggtttggttgcgggtgttgtggcccagttggcgccagtgtttggccagattattggtttggtggctggtttggctgcccagctggtgcctttgattagtatgcttgtcgcccggctagttcctgtgatcacgcagattattggtgcggtgacacaggttgcggccatgctgctgccagcactgatgccggtgttgcaggctgttatggctgtgatacggcaggttgttggcgtgatcatgcagcttgtgccggttttgatgcctgtgattcaacagattttgggtgctgtgatgtctgttctgccgcctattattggtttgatacggtcgctgataccagtcatcatgtcgattatgcgtgtagtgatgcaggttgttggtgccgtgttacaggtggtggcccgtattattccggttgtggctccggttgttggggctgtgatagggtttgttgcacgtattcttggcgctattgtgtctgccgcagcccgcattattggcgctgtaacccgtgttatcggatgggttgtgagccatctggtgtctggtgtggcgcgtatgggtacggccatcctgaatggctggaatcatattagggctttcacgtctgcgtttattaacggtttcaagtcgatcatttcgggcggcgtgaatgctgttgtggggttttttgcccggcttggttcttcggtggctagccatgttcggtctgggtttaacgcggcccgtggtgctgtttcttccgcaatgaatgctatccgtagtgtggtgtcttcggtggcgtctgctgttggcgggttcttcgggtcgatggcgtctagggttcgtagtggtgctgcgaggggctttaatggggccaggagtgcggcttctagcgctatgcacgctatgggttctgcagtgtctagcggtgtgcatagtgtgttggggttttttcggaatctgcccggtaatattaggcgtgctctcggtaatatgggatccttgttggtgtcggctggccgtgacgtggtttctggtttaggtaatggtatcaagaatgctttgagtggcctgctggatacggtgcgtaacatgggttctcaggtggctaacgcggctaaatcggtgttgggtattcattccccgtctagggtgtttcgtgatcaggttggccgccaggttgttgccggtttggctgaggggatcaccgggaatgctggtttggcgttggatgcgatgtcgggtgtggctggccgtcttccggatgctgtggatgcccggtttggtgtgcgatcgtctgtgggctcgtttacaccgtatggcaggtatcagcgtgcgagcgagaagagtgttgtggtgaatgttaacggcccgacgtatggtgatcctaatgagtttgcgaagcggattgagcggcaacagcgtgacgcgttgaacgcgttggcttacgtgtgagtgggggtgttgtgcatgtttattcctaacccgtctgatcgtgccggtttgactgttacctggtctatgttgccgttgattggtaatgatccggagcgtgtgcttcatttgacggattatacgggtgcgtctcctgtcatgttgttgaatgattcgttgcgtggtttgggtgttcctgaggtggagcatttttctcaaactcatgttggggtgcacgggtctgagtggcgcgggtttaatgtgaagcctcgcgaggtgacgttgcctgttttggtttcgggtgttgacccggatcctgcgggcgggtttcgtgacggttttttgaaagcctatgacgagttgtggtctgcgtttcccccgggcgaggtgggggagttgtctgtgaagactcctgccggtgttgagcgtgtgctaaggtgtcggtttgattcggtggatgacacgtttacggttgatccggtgaatcgtggctatgcccgctatgtgcttcatttgatagcctatgacccgttttggtatggggatgagcaaaagtttcgtttcagtaacgcgaagttgcaggattggttgggtggcggccctgtaggcaaaaacgggactgcgtttccggtggtgttgacgcctggtgttggttcgggttgggataacctgtctaataagggtgatgtgcctgcgtggcctgtgattcgtgttgaggggcctttggattcgtggtctgtgcagattgatggtttgcgtgtgtcatcagactatccggttgaggagtttgattggatcacgattgatacggatcctcgcaaacagtctgcattgttgaacgggtttgaggatgtgatggatcgtttgaaggagtgggagtttgctcctatcccgccaggcggttctaagagtgtgaatattgagatggttggtttgggtgccattgttgtgtcggtgcagtacaggtttttgagggcttggtgaatagttgatggctggtcttgtcccgcagataacattgtttacgccagactatcgtcgtgtggcgcctatcaatttttttgagtcgctaaagttgtcgttgaagtggaatggtttgtcgacgctggagttggtggtgtcgggggatcattccaggcttgacgcgttgacgaagccgggtgcacgccttgttgtcgattatggtggtggccagattttttctgggcctgtgcgtaaagtgcatggtgtgggtccttggcggtcttcgagggtgactatcacgtgtgaggatgatattcggctgttgtggcgtatgttgatgtggcctgtgaattatcgtcccggtttggtgggttcggagtggcgtgccgaccgtggttatgcccactattcgggtgcggcggagtcggttgctaagcaggtgttgggggataatgcgtggcgttttccgccaggtttatttatgaccgatgatgagcgtcgtggccgctatattaaggattttcaggtgcggtttcacgtgtttgccgataaattgttgccggtgttgtcgtgggctcggatgactgtttcggtgaatcagtttgaggataaggtgaatgatcagcggggtttagtgtttgattgtgtgcccgcggtgacgcgtagccatgtgttgactgccgagtcgggttcgattgtgtcgtgggagtatgtgcgtgacgcccctaaggctacgtcggtggttgttggtggccgcggcgagggcaaggatcggctgttttgtgaggatgttgattcgatggctgagggggattggtttgatcgtgtcgaggtgtttaaggatgcccgtaacacggattctgagaaggtgtctctcttcgatgaggctgagcgggtgttgttcgagttaggggccacgtcggggtttaagatcgagttggccgagtcggatgtgttgcgttttgggcccggcaagctgatgcccggggatttgatttatgtggatgtgggttctggccctattgcggagattgttcggcagattgatgtggagtgtgattcgcctggtgacggctggacgaaggtgactcctgttgcgggggattatgaggataatccgtctgccctgttggctcgccgtgtggctggtttggctgcaggtgtgcgggatttgcaaaagttttaaaagtgatgggggtttgttgtgggtattgtgtgtaaagggtttgatggtgtgttgaccgagtatgattgggctcaaatgtctggtctgatgggtaatatgccgtcggttaaggggcctgacgattttcgtgtcggcactacggttcagggtgccacggtgttgtgtgaggttttgccggggcaggcttgggctcacggggtgatgtgcacgtcgaatagtgtggagacggtgacggggcagctgcctggtcctggtgagactcgctacgattatgtggtgttgtctcgggattggcaggagaatacggccaagttggagattgttcctgggggtcgtgcggagcgtgcccgtgacgtgttgcgtgccgagcctggcgtgtttcatcagcagttgttggctactttggtggtgtcgtctaacgggttgcagcagcagttggataggcgtgccgtggcggctagggtggcgtttggggagtctgcagcctgtgatccgacacccatggagggggatcgtgtgatggttccttcgggggccgtgtgggctaatcatgctaacgagtggatgttgttgtctcccaggattgagacgggttcgaagtcgatcatgtttggcgggtctgctgtgtatgcttacacgatcccgtttgatcgccagttcagtagtccgcctgttgtggtggcgtctatggctacggcggctgggggtacgcagcagattgatgtgaaagcctacaatataactagcaaggattttggtttggcgtttatcacgaatgatgggtctaagccgaatggtgtgcccgctgttgcgaattggatagctgtgggcgtgtgaccgtgttgaggctgtggtggcggttggtgtgatgttggggggctgtggtgtcgtggtttactcctgcactggtggcctctatttgtaccgcgttggctactgttttgggttcggttcaggctgtcacatctaagtctaggaagcgtttgaggcgcctgtctgctcaggtggatgcgatggaagagtatacgtggggtgtgcggcgtgaggttcgccggtttaacgctggtcttcccgataatgtggatcctttggtgttgcctgatccgcccgggtttttgcaggatcagttggggggtgaatagatgagggagttggaggaggagaagcggcagcgccgtacttttgagaaggcttctatggtgttgttgtttctgtcgcttgtgctgttggcggtggttgctgggggtgctttgcgtttcggctctgtggtttcgcagagggattcggagcaggcgcgtgcggagtcgaatggtactgcggctaaagggttggctgcccgtgtgaagcaggtgtgcgcccagggtaggcaggagtcggtgcgtcttcaccggtctggcctgtgtgtggatgctgcccgtacggagcggagtgttcagggtgttcctggcccggctggtgagcgtggcccgcaaggccctgccggtgtggatggccgtgatggcagtaatggttcggctggtctggttggcccggttggcccgcagggttctcctggtttgaatggtgtgaaggggcctgacgggttgcccggtgctgacggcaaggatggccatggtggtgttccgggccgtgcaggtgatgacggtgtgaacggtgctgatggtcgggatggttcggccggtgaacgcggtgatgtgggcccttcaggttccgccggtccacagggtgaacggggtgagcgcggcccgcaaggccctgccggtgtcaacggatccgatggtaaagacggtaaggatgggcgtgatggccgctcggtggtgtctgtgtactgctcggagggccgcctgtttgtgaaatatagtgacggtgcgtcttctacagtgtcagggtctagggcgtgcccgggtgtggccccgtcgccgattgtgaccgtgtcatcccacaaatagtaagaggaagggtgttactagtgttgatgatgttttggggtggtgtgcggtgagatacattccagcggcacaccattcggctggttctaattctccggtgaatagggttgtgattcatgcgacgtgcccggatgtggggtttccgtccgcctcgcgtaagggtcgggcggtgtcgacggcgaactatttcgcgtccccatcgtctggtggctctgcccattatgtgtgtgatattggggagacggtgcagtgcctgtccgagtctactattgggtggcatgccccgcctaatccgcattctttgggtatagagatttgtgcggatggcggttcgcacgcctcgttccaggttccggggcacgcgtatacgcgggagcagtggctgtcgcctgaggtgtggcctgcggtggagcgggctgctgtcctgtgtaggcggttgtgtgaccggcatggtgttccgaaacggaagctgtccgtatcggatttgaaggccggcaagaggggtgtttgcgggcatgtggatgttacggatgcgtggcatcagtcggatcatgatgatccggggccgtggtttccgtgggacaggtttatggccgtagtctgcggccacgatagtggtagtgatagtggggagttaactgtggctgatgtgaaagcgctgcatgatcagattaaacaattgtctgcgcagcttactggttcggtgaacaagctgcaccacgatgttggtgtggtacaggtgcagaatggtgacttgggtaaacgtgtcgatgccctgtcgtgggtgaagaatccggtgacggggaagctgtggcgtacgaaggatgctttgtggagtgtctggtactatgtgttggagtgtcgcagccgcattagcaggcttgagtctgatatcaatagtttaaagaagtgatgtgtggtgggtaaacagttttggttgggcctgttagagcgcgccctgaaaacttttattcaaacgtttgttgctgtgcttggggtgactgcgggtgtcacctataccgcggagtcgtttcgtgggcttccgtgggagtcagctttgatcacagccacggtggctgctgtgctgtctatagcgacttcgtttggtagcccgtcgtttgtggccggtaaacccaaggttgctccggttgttgatgccggtcttgttccacccgatgataccggcctggtagaaccgcatgcggttgacgaaacggatcctggcatgatcgagccgatggatgatgataatgtggactatgtgccgaggcgtgcatccgagtctgaggttggcactgtagagccgtcagaatcataagtgaatatagtgtgtgccccagcggtgctgccacgtgtgtggtggctgctgctggggcactatttttgtgtctactgtatggctatgattcgttgttgtcgatggtggcttcgagcatctggtgcaggtgttcacactcggatatggtgtcacgggcttgatctaaaatgtctcgccggatcacgtttttgtggttgttgctgaggctgataagcgaacacatgatatcgtcggcggcggattgtagtagtttggcctggtatgcgattccggcgagccagtctatggcttccgggcttgcctgtgtgttgtctggcatgccactggtgttgctgttgtttgtggggtatcctgcactgtcgcagtcccacaggatttcgctgcactcgtctagcgtgtcttgatcgatgttgaggttgtcgaggctgacttctttgatggtgagatttacatcatctaaagagatgtggacgtggtattcgtcttgaatgtcggccacaatgttttccagctggttcatgttggtgggctgttgttggatgattcggtgtaccgctgttttgagggcagcgtgggggatattggttgtgttgttcatggttttatttcatccctgtactatcgtcgtctatgtatgatgttgtgttggcgtatttggtgagtgtgatcagtgtttggtctgcccactgtttcaccgtctgcctagtcacacccaatcgctgggctgccaccgaataggtttgatcatacccgtatacttccctgaatgcagccagccgtgccagccgtttcctctgtttggatggttcacaggtgagggtgtagtcgtcgatggctagctgtaggtcgatcatggtaacaatgttgttgccgtggtgttgtggagcggttggcgggggtggcatacctggctctactgatggtttccatggtccgccgttccagatccattgggcggcttgaatgatgtcggctgtggtgtaggtttggttcatgtgtcacccccggaacaggttgtcgaggttgtctaggttggggctggtgtttgtggtgtcgaatcgtcctacgcagtggcagtagtcgtacatgagtttaataatgtgttgatggtcaccaaggtaggtgttgccgctgatgctgtaggtggctgtgccgtctttgctgatggtgtatttggcggtgatagtttcgggtgtttcggtgttggtgatgatggcggtggtggtggtgcctactgtttggagtacggtggtttgggttccgtcgtcgagggttgtagtaaccataatgggggttctccttttagttgctggtttgattgtcggctatagtggtgatttcttgcaccggtttggggagatccaaatgctgtatggttttgttggctagccgtttggctaccctgtagcacattttggtgtagtgtttgttgtctaggttgtggtattgttctcgcaccgcaatatatagtagggagtcttggtacaggtcgtctgcgctgattgcggggtagtgttcggctattttggcgcatgcccggttgagtgtgcgtagatgatggtctgtggcccatccccacgatgctgtggtggccaggtctgcttttgttggtcgtctactcatgacactatttcatctcgctatctggtagttgtttggtgttttgttgttgatagtgtagcacacgagtccggggttgccggtggtgcctgtgcggtgccggtaccagacggattctccttccatggatgggcattgaataaaggtgcgttgtccttgctcggagatttctaggtggtgccggtgtcctgccatgaggatgtgggatgtggtgccgttgtggaattcttggcctcgccaccattcgtagtgttggttgttgcgccattggtggccgtgggcgtgaaggattttggtgcctgccacatcgacggtagtggtcatttcgtcccggctagggaagtggaagtgaaggttgggatattggttgttgagctggtaggcttctgcgatggcccggcagcagtccacgtcgaaggagtcatcgtaggtggtgacgcctttaccgaatcgtacggcttccccatggttgcctgggatggatgtgacggtgacgttggggcagtggtcgaacatgtggatgagttgcatcatggccatgcgggtgagcctgatttgttccgtcaagggtgtttgtgtgcgccaggcgttgttgcctccttgtgacacgtatccttcgatcatgtcgccgaggaaggcgatgtggacccggccgggtttgcctgcctgttgccagtagtgtttggcggctgtgagggatcgaagatagtcgtctgcgaagtgtgctgtttcaccctgagggatgcctttgccgatttggaagtcgcctgcccctaccacaaacgcacaatcactgttgttgctggtggtgtcggctggtttggggggctgccagtcggctagcttgtcgacgagttcatccacgggatacgggtctgttgcgggttggtggtcgatgattttttgtatggatcggcctgtttctccgttggggagtgtccattcggagatgcgtgtgcggcgtacggttccattggctagatcgtcgcagatggtgtctgcttcgtcattgtgctgggctagctgtgtgaggagccggtctatattgtctatcactggttttcctcctctttctgggtgttggtttgttggcggcgatagtctttgataacggtggcggagatggggtatcctgcctgggtgagctgtttcgctagccacgaggctgggatggttttgtctgcgagcacgtcggctgcttttgccccgtagcgttgaataagggtttcagttttggttgccatgatatcctatcggttgtgtggcgggctgccatcctgtgcggcagtcgccgtcgtgtcctggtttgcgtgtgcaccaggatatggttccgtctgtgtggttgagtgttttgccgcacatgacgttttgtagatgctctggcagtgcgccgtcaccctggttgctggtttgtgtgtcgaagagtgttttctggttagtgaaatgctcggatacggtcccgttgtggacgggtagtatccatgttttccattgctgctgtagcctggtgttccagtggaattgtttggccgcgttttctgcctgttttaaggttttgtagtagccaacgagtatgcgctggtgttgctggtcgggagggtttgggcctcgccagtattgtgcggccacggcgtagcggttgctggctgtgaaggtgttccagcagtattcgataatgttgttgagtgtgtcgtctgtgaagtcgtctgggttgtgttctgttgcctgggtgataatgccgcggatggcttgccggtttttggtggcgggtttgaacgagatgctcacgatagtaccggcttgtcgtcttgcatgaactggttgaaggtgttgttcccggcgtgttgggcttgtgtgatgtcctggtcggtccagtcggggtgttgctgtttcagatagtaccagtggcacgcattgtaggtttcgtcttgtagccgtgtgagatggttttcggtgatgatttgtttccacattgtccatgacacgtcgagccggttgaggatttcgagggctgggatgttgaattggttgaggaagaggatttcgtaggtgtagtagtttttctcgtattggtcccatccgcttcggtgcctgttgggctggtttttggggtaggcttcccggcatactttgtgtaaacgtttggccatgtcgtcgggtagtttaatgtcggggttggcgcggatcatggatcgcatcccatcataggtggtgccccaggtgtgcatgatgtaggtggggtcttcaccatcggcccatttttctgcacagatggcgaggcggatgcgcctcctggctgcttggctggtgttgcgccggttggtgatggggcacgtgtcgaggggatccatgatattttagtgtacctttcttggtttgggttgcttgtgtggttttattgtagcactgtgttgagggcttgtgtcaaccctgttttgccggttttcaggtaggtgtctgtgacatccccgagggtgaggggcacatgggtggcttggggaagtgctgtctggagagtttgggccatcttatctcccgcggggtcggggtcggaccagatgtaaacatggtcgtagccttcgaagaatttggtccaaaagttttgccacgaggttgcgccgggtatggcgacggcgggccatccgcattgttcgagtatcatggagtcgaattcgccttcacaaatgtgcatttctgctgccgggttggccatggcggccatgttgtagatggagcctgtatccccggccggggttaagtatttggggtggttgtgggttttgcagtcgtgttgtagtgagcagcggaaacgcatttttcttatttcggctggccgcccccaaacggggtacatgtaggggatggtgatgcactggttgtagtcttcgtggccggggatggggtcattgtcgatgtatccaaggtggtggtagcgggctgtttcttcgctgatgcctcttgccgagagaaggtcgagtatgttttcgaggtgggtttcgtagagggccgaggctttctggattcggcggcgttccgcaatgttgtatgggtgtagtgagtcgtacattcgggttttcttcttccaatcgttgttgtagcttggcgaggccgcctccaacaccgcatgtgtggcagtaccagacgcccttgtcgaggttgatgctcatggagggctggtggtcatcgtggagtgggcagaggatgtgttgctcgtttttggacgggttatagcggatgcgataggtgtcgaggaggcggcgggtgtcagaggtgtgggaggagctcgttgagggttgataccacataggcttcgctccatggcttgtttcgctgtttcatgatgactagtccgatggtggattggttttttttgttgcggtgggtttcatagttgcgtgcctcgattgtggcttctttcacgaattgggcgagatgctgctggccagccttggcttcgatcacataggttttgttgccggttttgaggatgaggtcgccttcgtcctctttgccgttgaggtggaggcgttctatatcgtagccggtgttgcgtagctggtgtaggagtctggtttcccactcggcaccggcccggcggttgcgtgactgttgtgaaaccatcatagtcctttatgttcttgtgtcatgttccatggctgtttttctaccaatggcccgaagaatgtgtattcggggtaggccctgagtctttcgtatcgggtgccgtctgggctagatttgccggtgcgctgtttcaacacagcaatgcgtgcctcggctggtatcgatagcccgttgccgttatcctcgccaccatacaatgagactccgaggatgagttgtggtttttcggagaggccgtttttgatctctcgtctggctggcgggtgttcgaggtcggtgccggttttgtcggtggcgtggtgtgtgacgatgatggtggagccagtatcccgacccaatgctgtgatccattgcatggcttcttgttgggcttggtagtcactctcgcagtcttggatgtccatcaggttgtcgatgacaataaggggtgggaaggtgttccacatttccatgtaggcttgtagttccatggtgatgtctgtccaggtgatgggtgactggaatgagaatgtgatgtgttggccgtggtggatgctgtctcgatagtattctggcccgtagtcgtcgatgttttgttgtatctgggtggtggtgtgttgggtgttgagtgagatgattcgtgtggaggcctcccagggtgtcatgtcacctgaaatatatagtgctggctggttgagcatggcggtgatgaacatggctagcccggatttttggctgccggaccgccccgcaatcatcaccaaatcccctttgtggatgtgcatgtccaggctgcggtagaggggttctagttgtggtatgcggggcagctcggctgctgtttgggaggctctctcgaaggatcgttgtagagagagcatcgggaccttatctatctatcggtggttgtgggtggtcagatggagtcgatatcgatatcagcctctgctgatgctgaagtgtcatctagctggccattatcgcgcttgtctacgtattcggcaaccttatcatagatggcgtcatcaaggggtttgagcacaaccgcgttgaacccgtttttggtgcgcacggtggcgagtttgaaggcctgctcctcgccaaggtatgcctctagatcgcggatcatggagtgtgggcggtcgttattgccgcgcgctttctcaataatagcgttggggatggtttctggggtgccgttgttgagatcgtctagggtgtggaagatggtgacgtcggcgtagatgcggtctgcgacctgtccgccgtagccttcagtgttgtgttcgacgtcgtggactttgaaggcgatggcggtggcatcctggtttttggacgggttgaagaaggtgctgctgttgttgtttcggtagttggcgagtcccataactgtatcctttactgtttgtgttgttttgttggtttgtgtcggtttttatcgggtgaggctgtttcgtttattcctgaaagcctctgacacgtccgggttgctggtgattgtctttttgtactgtttgaggaggtcggctagctgtgccttgcttgttgctttgttgattttgtcaataacgatggtgttttcttgggatgcgatgttgtctacatagtttttggctgcctggtcgtatcggtcttggagaatgatggaggcgctcgcgatcagtgttgccaaatcccagtctttagagacgtcgtcgtttttgagtcctcccagtaaatcaatgatggattgtttgatgtcttctgtggtgtctcctctgatgactgcccacggggcggcatagtctccaccgtatttgagtgtgatagtgatacgatcatccgtactgttggtgtcggtcactggttctccttatctttctcgagtggtgtgatggtggttttgatcgggtacctgtaggcgtccttgccgtctaccgcccagcaggcgtctcgtacggggcatcctttacacagggctgtgacgtgggggacgaagatgccttggcttattcctttcattgcttgactgtacatgcatgatacatgccggtaggtgttgttgtcaagatcgtacagttcggttgatgtgccctgctcgaccgattgctcgtatcccttggtggtggcgggtgtccaaaacatgcctttcgtcacctggatgccgtgttgggcgagcatgtaccggtaggtgtgcaactgcatagcatcgactgggatgcgcccggttttcaggtcgaggataaacgtttcgccggtgttggtgtcggtgaagatgcggtcgatatagccgacaatctgtgtgccgtcggcgagggtggtttcgactgggtattcgatgcctggctggccgtcaatggttgcggtgatgtattctgggtggtttcgcctccatgttttccaccggtcgacgaagatggggccatagtgtatccaccaatcatagtttttcttgttgggcccgcctgactcgcacatgtttttgcacaccctgccggagggtttaatctgggtgccctcttctttgaccagggcgatttgggtgtcgaacacattgttgaaggatgagagtttgtcgggcagtgcagggtattcgacggggttatacaggtggaggtcatgctgttcggttatgtggtgtatagcactgccggcgatggttgcataccaggtgtggtgttgggcatggtagccgtgggatagtcgccatttttcaccgcattcggcccactgtgtgagtgaactgtaggagatgtggcctggatgctggatggttttcggatattgtgctagaggcatgttagttgtttttgttccatgggttgcgggtgtcttggccggcctggtgttgctggtatgcgaggagtgtcaggcagtgccaggctgcatgggccagatgcggcagatgtgattcatagtcgaggttgtttccttgctgccaggctagtagatgtctgtagagggcgtcgatactgtgacaccaggggtatcctccggtccagttgttgtcgccgtatttggtggcgccgtatccggctacttcgccgagcgagtggagggatgcggggtcgatgagggagagcctgcatagtttcagttcttttttggcgccggtgttggggtcggtgtacatgcgggtgggctcatccatgagatgtgtgcgcctttcttgagtgggttactggttgttgtcgtgggctagggctacggcgagaatgatgatggcgagggtttcagcgatgatgatgggtgttgtgatcatttggtgtcgcggggatggtaggtgagggttgatgcgcctaggagggtggcgagggcgcaggctgcgatgattgcgagggctgctttgtggctagtgcctgttgcgtacatccatgtgatgatgccgccttggatccatgcgaggctggtgaagaatgtttcgtaactgtgcagctcaatgttgttgttgcgtgtgttcatgcttgttcctgaatgatggtgttgatggttttgtaaatgttgtacaggtctgtttcgatggtttttagctggctgatttggtggtcgaggttgatgttcgggttgagggtgttgatgcgggatgcgatgtcggtggctgtgcgtagtgtgccgccggtgtggtgaatgatgtgtgccgtgtcggcgaggccggtggtgacggcgtagtgggagaggagaggcatgataggtgtgctttctttctggtcagcgtgaagggttgatggacatgtcctcaacctgcggcttgtcttcggtaccggacacttggcagaaaaccttcacttgtgccttggatgccccgggttgctttgcggtggcaccgtaggcgatggagaaggtgtctttgtgggcgccgatgactttgtgtaggaagaggtcgatgtcggggtttccgttccagttgacaccttgcgctgcagccatctgggtggctttctgattgcaggcgtgtgctgccgtaatcatagtgagcccggtggaggtttcttcaccgcgggcttgcgcctgccgatgagccttggcctgctcggcttgtagggagcggactgcttctgcctgcttggctgtcttctcagccttgcgctgctgtgcggttttgggggtccattcggtgttggctgtggtggcctgtggggctggctgtgatgcgagtggcgggttgtcgtcgggggctggtaggaaggaggctgcggcgatgatggcgagggtggctccggcgatggtgtagcctgttttcttgttcatgaccgtgttcccctctcgtggggtttgttcgttgctgacatgattaatcattccatgggtggcatcggctgtcaagctgcgctcatttgggttgagcgttccttgtgtggctaggtgttttatcgggcgaatagggttaacaggtggccaacattgatgcgtgtcacattccagtagagttgtgtcgcctctgcctgtgtgagtggtttccactggttgtggctgtatacggttccgtcggtggcgatgaacgtgtcggggcgcatcttgtggagttcggcttccacatgctgccggtaggcttcggcgaggccctcaaaatccatatggtcgcagtggaggttttcgaggcgtgtcaggtcgaagggtgtggggcagtcgtagctggcggggctgtagagctgggtgaagtggtcggcgatcttttgcacgattattcctttccggtgatggtgtgttggttgtttgatcgtgtggcttcggcgatgatggcgtccacgtcgattgtgtcgatgatgtagtagagttcctcggcctcgtcctcggtgagtggctgccagttgcgtggcccgtatatggcgccgtcgagggtgacggtccattgtgggcggatgagccggatggcttcttcgactttggcacggtatagacgacagatgatagacgtctgggtgttgcctatgttgtgccctgttaggtgtgcggggtggagtgggttgatttctgtcggcccgtagagggttgtgaaggatggtgtgatgagtgttccatccacggtgggtgctcctttctggattgtttgggttgttgtggtttttatggtgtgatggttgcaaccgtgagtcaaggctgcgctcattcagcttgagcgtttcatgaggggtgtggtgtatatcactgaagcctttattgctcctgtaagcgtcttaaatggtctgggggtaggattatgcaggactaaccctgctagtcgattctagggcccttctagggcgtctcaggggtatgtctgggtgatggtaggtgttgtagatcattcggacgctcgaggttgtcatacatgacgatggttggggtgttctatctgggcataggttccactccctgtagtgtgtgagatagaccacatttccctagcctagtgtccatcaccaacaccccgcagctgatctggcgtggagggtgtagcccagaaatgccgtttaaagcttctagggtacacctaggagcgccttgcagggtgggggctaggtatttatacccccagcacattctgatcgattctagacgcctataagagctcgatacgtgatcagatcaccagacgcagaccatcctcccccatcctgcttagctaagcctacactatgtggacagtgtaggatactgtaggggaagaaagacacggtacaagaaagaagggggaggatccgccttaaagtcttagcacttaaggttttagcgcttagcaccgagccccctcaagggctcggcatcagcaccaccaggctcagctcatcaggcacagcctgaaagaggtacacgccatcagggaaggcttgagagtacgaggagccctagcgacgagtactcgaaagcctgagggaacacccttagtactgatgggcctagcgtgttcggaaaagacacacgagtcaagtgtgacagtccatcaggggtgaaacccgttctggctaggggtttcagccctaaccacccttaaaggttacaagagtctaagaaaatttaagaaaactcttaggaagaaagttgtgttcatgtccacccaaaaacagccaaaatagccctcaaacccgctaatagagccaaaccttcatgtttgactcttccagacggcgtatgctaggctggacaggtagccagctggacgcaaggccagaaagtgctgacgcacttcccgacctcgcttaccatcagtctaccaaacacttaaagaccttaagggcttagcgctaagcagcttaacacttagcaccgagcccttgaggggctcggcatcagccctaaggtacttatagtaactttaaaaccttaagagcttagcctttaaggatctaagttactataaaagctttcagaacttagtacttaatactttaagtaaacataaaagcttttaagtcttaaagtaaatatataaccttaagacttaaacattaacacctaagttaagtataaaaccttaaaggcttagcacgtaaggatctaaacttaacatcagtgtttaagactttaaaacttaaaataaaccataaagacttaaagacttataagctttaaacacttaaagtaactataagactttaaagaccttaagtacttaaagttaaccatcagtcttaaactttaatcttataacctataagtcttaaagcttataagttataaaagtttttagaagagtaaaggggttaacttctttacttctcttctctctttggttctttctctcttctcttcttttcttcatcaggggagaagaggaaccttttgccatcagcgctgatgggttttcgccgtgtgtctcgtgtgctcctggtcgcacgctcccgtcgcacactccccacactcttacacccgtgtccctttcaggcttagcgtgttcggctgaaggcgtacggcgtgtcacgctaacacccttaacatcaggtgagacttaaagtgtatattatatgtagaagactttaaaacctttaagggtgtacacgtttaggctgtgtccaacactgctaggcgcgaagtgctaagccttaaagcgctaacacacacccacccccatttttcttccgtgtccttttctttttgacaccgctggggggcgatgtgatctttctcacacccgtgggggtaggagagaaaaacaaacaccccaccacgatcacaaccccccaccaaacgaacaaaacagcccccagaatcgactagtagggcacaggtggggtaaacctaccccggacacattccaggctgttacagagacaacgagaagcttacaagggcttgggtgatgaggaggcgcgatggcacacaccaaccgcaccgcatcctccgcccaccgacgctggcgcgagcgactcatcacccaagcccgacaacaaggccaaaccgaatgcccactctgcggagcaaccatcacctgggacactcaccaactaccaaccagccccgaagccgaccacatcacacccgtcagccggggaggactcaacaccctcgacaacgggcaaatcatctgcagaacatgcaacagaagcaaaggcaatcgcagcgaaccaaacatcagtttccaacaacaaaccacaaaaacccttgtcacctggtgaaaaaccagccaacccccgacggggaccaccccctgcacacccgtgcaagacc

SEQ ID NO: 39 - DNA, 29512 bp, unidentified
  source 1..29512: mol_type = unassigned DNA; note = Bacteriophage of P. acnes
agtgaaatacctcccctttgttgttttatcgttttgtcgactttttgtttggtggtgatggtggtgcagcctgagcttcccgagtctcgtgagtggtgtgaggagacgcgtcgttggtggcgtgtgtggggtgaggatgcgcgtgctgggtttgtgtctgatgaggagtggctgtttctcatggatgctgcggtgattcatgatgtggtgtggcgtgagggtcgcgcggaccttgtggcttcgcttcgtgctcatgtgaaggcgtttatgggcatgttggatcggtattcggttgatgtggcgtctggtggtagtggcgggggttctgcggtggcgatgattgacaggtatcggaagcgcaagggggcctgattaggtgtctggtgtggttggttctcaggttcctcgtcatcgtgtggcggcggcgtattcggtgtctgctggtggggatgctggtgagcttggtagggcgtatgggttgtcgcctgatccgtggcagcagcaggtgttggatgattggcttgctgttgggacgaatggccgtttggcgtctggtgtgtgtggggtgtttgtgcctcggcagaatggcaagaatgctattttggagattgtggagttgtttaaggcgactattcagggtcgccggattttgcatacggctcacgagttgaagtcggctcgtaaggcgtttatgcggcttcgatcgttttttgagaatgagcggcagtttcctgacttgtatcgtatggtgaagtcgattcgtgcaacgaatggtcaggaggctattgtgttgcatcatccggattgtgccacgtttgagcgtaagtgtggctgtccgggttggggttcggttgagtttgtggctcgtagccgggggtctgctcgcgggtttaccgttgatgatttggtgtgtgatgaggctcaggagttgtcggatgagcagttggaggctttgcttcctacagtgagcgctgccccgtctggggatcctcagcagatttttttgggtaccccgccggggccattggctgatgggtctgtggtgttacgtttgcgtgggcaggcgcttggtggcggtaaacgtatcgcgtggactgagttttcgattccggacgagacggatccggaggatttgtctcggtcgtggcggaagcttgctggggatactaatcctgcgcttggtaggcgtctgaattttggtaccgtgtctgatgagcatgagtctatgtctgctgccgggtttgctcgtgagaggcttggttggtgggatcgtggccagtctgctgtgtcggtgattcctgccgataagtgggcgctatcggcggttgatgaggtgcatctttctggtgggaaagtgtttggggtttcgttttctcgttctggtaatagggttgctttggcgggtgctggcagggcggatgctggggttcatgttgaggttattgatggcttgtcggggacgattgttgatggtgtaggccaactggctgattggctggcgttgcgttggggtgacacggaaaagattatggttgccggttctggtgcggtgcttttacagaaggctttgactgatcgtggtgtgccgggtcggggcgtgattgtggccgataccggtgtttatgttgaggcgtgccaagcttttctggagggtgtgcgttcgggtgttgtttctcatccccgtgctgattctcgccgtgacatgttggagattgctgtgaggtcggcggttcagaagcgtaagggatctgcttggggctggggctcgacgtttaaagacggcagtgaggttcctttggaggctgtgtcgctggcgtatcttggtgtgaagatggcgaaggctaagcggcgtgagcgtagtggtaggaagcgggtgtctgtggtatgaacgtggacgagttggctcttattgagggcatgtacgatcgtattaagaggttgtcttcgtggcattgccgtattgagggctactatgagggttcgaatcgtgtccgtgatttgggggttgctattcctcctgagttgcagcgtgtgcagacggtggtgtcgtggcctgggatagcggtggatgctttggaggagcgtctggattggcttggctggactaatggtgacggctacggtttggatggtgtgtattctgcgaatcggcttgctacggcgtcgtgtgatgtgcatttggatgcgctgatttttggtttgtcgtttgtggctgttattccccaagaggatgggtcggtgttggttcgtccgcagtcaccaaagaattgcaccggaaagttttcggctgacgggtcgcgtcttgatgctggcctggtggtgcagcagacgtgtgatcctgaggttgttgaggcggagcttttgcttcctgatgtgattgttcaggttgagcggcgggggtctcgtgagtgggtcgaggtgggccgtataccgaatgtgttgggtgcggttcctttggtgccgattgtgaatcggcgcaggacgtctcgtattgatgggcgctccgagattacgaggtctattcgtgcttacacggatgaagcggttcgcacgctgcttgggcagtctgtgaatcgtgatttctatgcttacccgcagcgctgggttacgggtgtttctgcggacgagttttctcagcctggctgggtgttgtctatggcttctgtgtgggctgtggataaggacgatgacggtgatactccgaatgttgggtcgtttcctgttaatagtcctaccccttattctgatcagatgcggctattagcccagttgactgctggggaggctgcggtgcctgagcgctatttcgggtttatcacgtctaacccgccgtcgggtgaggcgcttgcggcggaggagtctcgactggttaagcgtgctgagcggcgtcaaacatcgtttggtcagggctggctgtcggttggttttctggctgcgaaggcgttggattctcgcgtggatgaggctgcttttttcggtgatgtgggtttgaggtggcgtgacgcgtcaaccccgactcgggcggctacggcggatgctgtgacgaagcttgtgggtgccggtattttgcctgctgattctcggacggtgttggagatgttgggtttggatgatgtgcaggttgaggctgtgatgcggcatcgcgccgaatctgcggatccgttggctgcgttggctggggctatttctcgtcaaactggcgaggtttgatggatggcttcgggtgtgatgtcgaggctggcggcgactgagtatcagcgtgaggcggtccggtttgccgggaagtatgcgggctattatgccgagcttggtcgtttgtggcattccggaaaaatgagtgacacgcagtatgtgcgtttgtgtgtcgagttggagcgtgccggccatgatggttcggcgtcgttggcggcaaggtttgtgtcggattttcgccggttgaatggtgtggatcctggtttgattgtgtatgacgagtttgatgctgctgctgcgttggcccggtcgattgcgaccacgaagattttgaagggtgatccggatagggcgaatgatactattgatgcgatggcggcgggttttgatcgggctgtgttgaatgctggccgtgacacggttgagtggtcggcgggtgcgcagggccggtcgtggcgtcgtgtcacggatggtgatccgtgtgctttttgtgcgatgcttgcaaccaggtcggattatacgactcgggagcgtgcgctaaccgtggggcatactcggcgtcataggcggggtggtaagcgtccgctgggttcgaagtatcatgatcattgtgggtgtacggtggttgaggttgttgggcgttgggagcccagttccgcggacaccgcatatcagcgggtttatgagaaggctcgtgagtgggttgatgatcatgggttgcagcagtcgcctggcaatattttgaaggctatgcgtactgttggcgatatgagatgattgatatggtttccggttgtgcgccgccggttatcggtgcacgtggttgtctcccgcacggggggcggcaagattgtgttgttttccgcaaggagtgtagggttaggctatggccgatcagaatgttgaagaacaaaacgtcgacaaagtagaagaggttcccgaaaagggtgacgttgttgacgtcgtaaaggatgatcaaagcgggcagacaggcgatcagtcgaagcatgatggtggagataagccgtctgggactgattggaaggctgaggctcgtaagtgggagtctcgtgctaaaagtaatttcgccgagttggagaagcttcgcgcctcggatggtgatgcggggtctactattgatgagcttcgccgtaagaatgaggagctcgaagaccggattaatgggtttgttcttgagggtgtgaagcgcgaggtggctgccgagtgtggcctttcggccgatgcggtagcttttctgtctggcggtgatcgcgagtcgcttgccgagtctgctaaagcccttaaggggctgattgaccatagtggtagtggtggcgcgggtgtgcgccgtcttgcggggagtgcccccgtggatgatgttaaacgacgtgagggtgtcgcgtttgtggatgctcttgtcaataattctaggagatgatttatcatggctgacgattttctttctgcagggaagcttgagcttcctggttctatgattggtgcggtgcgtgaccgtgctatcgattctggtgttttggcgaagctttcgccggagcagccgactattttcggacctgtgaagggtgccgtgttttcgggtgttcctcgcgccaagattgttggtgagggcgaggttaagccttccgctagcgttgatgtttccgcgtttactgcgcagcctatcaaggttgtgactcagcagcgtgtctcggacgagtttatgtgggctgacgccgattaccgtctgggtgtgcttcaggatctgatttcgcctgctctgggtgcttctattggtcgcgctgtggatcttattgctttccatggtgttgatccggctacaggtaagccggctgctgctgttaaggtgtcgctggataagacgtcgaagacggttgatgccacggattctgccacgaccgatctggtcaaagcggtagggctgattgcgggtgctggtttgcaggttcctaacggtgtcgccctggatccggcgttctcgtttgcgctgtctaccgaggtgtacccgaaggggtctccgcttgccggtcagccgatgtatcctgccgccggtttcgctgggcttgataattggcgtggacttaatgttggtgcttcttcgactgtttcgggtgccccggagatgtcgcctgcctcgggtgttaaggctattgttggtgatttctctcgtgttcattgggggttccagcgtaacttcccgatcgagctgatcgagtatggcgatccggatcagactgggcgtgatcttaagggccataatgaggttatggttcgtgctgaggctgtgctgtatgtggctatcgagtctctggattcgtttgctgttgtgaaggagaaggctgcaccgaagcctaatcctccggccggtaactgatttattgtagcggtgatatgtatatgtgcagggggtggtgttgatgggtatcattttgaggcctgaggatattgagcctttcgccgatattcctaaagataagcttgaggcgatgatcgctgatgtggaggctgttgctgtcagtgtcgccccctgtatcgctaaaccggacttcaaatacaaggatgctgccaaggctattctgcgtcgtgctttgttgcgctggaatgatactggcgtgtcggggcaggtgcagtacgagtctgcgggaccgtttgcccagactacacggtctaatacgcctacgaatttgttgtggccttctgagattgctgcgttgaagaagctgtgtgagggtgacggtggggctggtaaagcgttcacgatcacacccacgatccgtggcggatatgcacattctgaggtgtgttctactgtgtggggtgagggctgttcgtgcgggtcgaatattaacggctacgctggccctttgtgggagatatgatatgattaattttccttacggtgaaacggttgtgatgcttcagccgactgttcgtgtcgatgatcttggcgacagggttgaggattggggccatcctgtagaaaccgtgtaccataatgtggccatctatgcttctgtgtcacaggaggatgaggctgccggccgtgacactgattgggagcattggtcgatgctgttcaagcagcctgtcaagggtgccgattatcggtgtcgttggcgtattcggggtgttgtgtgggaggctgacgggtctcctatggtgtggcatcacccaatgtctggctgggatgctggtacgcaggttaatgtgaagcgtaaaaagggctgatggttgtggcacgtgatgtgaatgtgaagcttaacttgccgggtattcgtgaggtgttgaagtcttctggggtgcagggcatgttggctgagcgtggcgagagggtcaagcatgcggcctctgctaatgtgggtggtaatgcttttgataaggcccagtatcgtgccgggttgtcgtctgaggtgcaggttcaccgtgttgaggctgtggctaggattggcaccacctataagggtggtaagcgtattgaggcgaagcatggcacgttggctaggtcgattggggctgcgtcgtgatcgtttacggtgatcctcgtgtgtgggctaaacgtgtgctcaaggatgatggctggctgtctgatataccgtgcacgggtactgtgccggatcaatttgagggtgacctgatttggcttgcgttggatggtggcccccagttgcatgttcgtgagcgtgtttttcttcgcgtgaatgtgttttcggatattccggatcgtgctatgtcgttggcgcgtcgtgttgaggctgtgctggctgatggtgttgatggtgatccggtggtgttttgtaggcgttctactggtcctgatttgttggttgatggtgcacgttttgatgtgtattcgctgtttgagctggtgtgccgtcctgtcgaatccgagtaaacgtatttgttttctatattttgtttttgtttgattatttttgggggttgtgatggctgctacacgtaaagcgtctaatgttcgctctgctgttaccggtgacgtctatattggtgccgctcacgccggtgacactattgatggtgttgggaagattcctgacggtcttaccgctttagggtacctgtcggatgacgggtttaagattaagcctgagcgtaaaacggatgatttgaaggcttggcagaatgcggatgttgttcgcaccgtggctacagagtcgtctatcgagatttctttccagctgatcgagtccaagaaggaggttatcgaactgttttggcagtcgaaggttactgccggagtcgattcgggttcgttcgatatttctcctggtgctacgaccggtgttcatgccctgttgatggatattgttgatggcgatcaggttatccgctactatttccctgaagctgagcttgtcgatcgtgacgagatcaagggtaagaatggcgaggtgtatgggtatggtgtcacactgaaggcgtatcctgcccagattaataagaagggtgatgcggtgtctggtcgggggtggatgacggctttaaaagctgatactcctccggttcctccgaagcctccgaagcctgagccggatcctaatccgccagccgagaactgatacatatttttgagggattgttgatagatgagtgacacaggtttcacgttgaagattggtgaccgtagttgggtgttggctgatgcagaggagacggcgcaggctgttcctgcccgtgtttttcgccgtgccgctaagattgcccagtcgggggagtctgctgatttcgcccaggttgaggtgatgttttctatgttggaggctgccgccccagcggatgctgtagaagcgcttgagggcttgcctatggtgcgtgttgccgagattttccgtgagtggatggaatacaagcctgacggtaagggtgcctctttgggggaatagtttggctccacggcctgattgatgattatcgtggggccatcgaatatgattggaggacccggttcggttgctctgtttatgatgttggtggcccggtgatgtgttggggtgaggctgtccggctggctggcgtgttgtgtactgatacgtcgagccagttggcagcccatctgaatggttggcagcgcccgtttgaatggtcggagtgggcggtgttggatatgttggatcattacaggtctgctaatagtgaggggcagccggagcctgtggcgaggccgacggatgagcgtcgggctaggtttacgtcgtctcaggtggacgatattttggcgcgtgttcgtgccggtggcggggtgtctcgcgagattaatattatggggtgaatagtgtatgtctggtgagattgcttccgcctatgtgtcgttgtatacgaagatgcccggtttgaaggctgatgttggtaaacagttgtcgggtgtgatgcctgctgagggtcagcgttcgggtagtctttttgcttccggtatgaagttggctttgggtggcgcggcgatgatgggtgccatcaatgttgccaagaagggcctgaaatcgatttatgatgtgactattggtggcggtattgctagggcgatggctatcgatgaggctcaggctaaactgactggtttgggtcacacgtcttctgacacgtcttcgattatgaattcggctattgaagctgttactggtacgtcgtatgcgctgggtgatgcggcttctactgcggctgctttgtctgcttctggtgtgaagtctggcgggcagatgactgacgtgttgaagactgtcgccgatgtgtcttatatttctggcaagtcgtttcaggatacgggcgctattttcacgtcggttatggctcgcggcaagctgcagggcgatgacatgttgcagcttactatggctggtgttccggtgttgtctttgcttgcgaagcagacgggtaaaacgtcggctgaggtgtcgcagatggtgtcgaaggggcagattgattttgccacgtttgcggctgcgatgaagcttggcatgggtggtgctgctcaggcgtctggtcagacgtttgagggcgctatgaagaatgttaagggcgctttgggctatcttggtgctacggctatggccccgtttttgaatgggttgcggcagatttttgttgcgttgaatccggttatcaagtcggtcacggattctgtgaagcccctgtttgcgtcggtggatcaggggattcagcgggtgatgccgtctattttggcgtggattaatcgtatgccgggcatgattacgagaatgaatgcacagatgcgcgccaaggtggagcagttgaagggcatttttgcgagaatgcatttgcctgtccctaaggtgaatttgggtgccatgtttgctggcggcaccgcagtgtttggtattgtggctgccggtgtggggaagcttgttgcggggtttgccccgttggcggtgtcgttgaagaatttgttgccgtcgtttggtgctttgaagggtgccgctggcgggcttggcggcgtgttccgtgccctgggtggccctgtcgggattgtgatcggcttgtttgctgccatgtttgcgacgaatgtccagttccgtgcctctgtgatgcagcttgtgggtgttgtcggtcaggcgttggggcagattatggctgctgtgcagccgctgtttggtttggttgcgggtgttgtggcccagttggcgccagtgtttggccagattattggtttggtggctggtttggctgcccagctggtgcctttgattagtatgcttgtcgcccggctagttcctgtgatcacgcagattattggtgcggtgacacaggttgcggccatgctgctgccagcactgatgccggtgttgcaggctgttatggctgtgatacggcaggttgttggcgtgatcatgcagcttgtgccggttttgatgcctgtgattcaacagattttgggtgctgtgatgtctgttctgccgcctattattggtttgatacggtcgctgataccagtcatcatgtcgattatgcgtgtagtgatgcaggttgttggtgccgtgttacaggtggtggcccgtattattccggttgtggctccggttgttggggctgtgatagggtttgttgcacgtattcttggcgctattgtgtctgccgcagcccgcattattggcgctgtaacccgtgttatcggatgggttgtgagccatctggtgtctggtgtggcgcgtatgggtacggccatcctgaatggctggaatcatattagggctttcacgtctgcgtttattaacggtttcaagtcgatcatttcgggcggcgtgaatgctgttgtggggttttttgcccggcttggttcttcggtggctagccatgttcggtctgggtttaacgcggcccgtggtgctgtttcttccgcaatgaatgctatccgtagtgtggtgtcttcggtggcgtctgctgttggcgggttcttcgggtcgatggcgtctagggttcgtagtggtgctgcgaggggctttaatggggccaggagtgcggcttctagcgctatgcacgctatgggttctgcagtgtctagcggtgtgcatagtgtgttggggttttttcggaatctgcccggtaatattaggcgtgctctcggtaatatgggatccttgttggtgtcggctggccgtgacgtggtttctggtttaggtaatggtatcaagaatgctttgagtggcctgctggatacggtgcgtaacatgggttctcaggtggctaacgcggctaaatcggtgttgggtattcattccccgtctagggtgtttcgtgatcaggttggccgccaggttgttgccggtttggctgaggggatcaccgggaatgctggtttggcgttggatgcgatgtcgggtgtggctggccgtcttccggatgctgtggatgcccggtttggtgtgcgatcgtctgtgggctcgtttacaccgtatggcaggtatcagcgtgcgagcgagaagagtgttgtggtgaatgttaacggcccgacgtatggtgatcctaatgagtttgcgaagcggattgagcggcaacagcgtgacgcgttgaacgcgttggcttacgtgtgagtgggggtgttgtgcatgtttattcctaacccgtctgatcgtgccggtttgactgttacctggtctatgttgccgttgattggtaatgatccggagcgtgtgcttcatttgacggattatacgggtgcgtctcctgtcatgttgttgaatgattcgttgcgtggtttgggtgttcctgaggtggagcatttttctcaaactcatgttggggtgcacgggtctgagtggcgcgggtttaatgtgaagcctcgcgaggtgacgttgcctgttttggtttcgggtgttgacccggatcctgcgggcgggtttcgtgacggttttttgaaagcctatgacgagttgtggtctgcgtttcccccgggcgaggtgggggagttgtctgtgaagactcctgccggtgttgagcgtgtgctaaggtgtcggtttgattcggtggatgacacgtttacggttgatccggtgaatcgtggctatgcccgctatgtgcttcatttgatagcctatgacccgttttggtatggggatgagcaaaagtttcgtttcagtaacgcgaagttgcaggattggttgggtggcggccctgtaggcaaaaacgggactgcgtttccggtggtgttgacgcctggtgttggttcgggttgggataacctgtctaataagggtgatgtgcctgcgtggcctgtgattcgtgttgaggggcctttggattcgtggtctgtgcagattgatggtttgcgtgtgtcatcagactatccggttgaggagtttgattggatcacgattgatacggatcctcgcaaacagtctgcattgttgaacgggtttgaggatgtgatggatcgtttgaaggagtgggagtttgctcctatcccgccaggcggttctaagagtgtgaatattgagatggttggtttgggtgccattgttgtgtcggtgcagtacaggtttttgagggcttggtgaatagttgatggctggtcttgtcccgcagataacattgtttacgccagactatcgtcgtgtggcgcctatcaatttttttgagtcgctaaagttgtcgttgaagtggaatggtttgtcgacgctggagttggtggtgtcgggggatcattccaggcttgacgcgttgacgaagccgggtgcacgccttgttgtcgattatggtggtggccagattttttctgggcctgtgcgtaaagtgcatggtgtgggtccttggcggtcttcgagggtgactatcacgtgtgaggatgatattcggctgttgtggcgtatgttgatgtggcctgtgaattatcgtcccggtttggtgggttcggagtggcgtgccgaccgtggttatgcccactattcgggtgcggcggagtcggttgctaagcaggtgttgggggataatgcgtggcgttttccgccaggtttatttatgaccgatgatgagcgtcgtggccgctatattaaggattttcaggtgcggtttcacgtgtttgccgataaattgttgccggtgttgtcgtgggctcggatgactgtttcggtgaatcagtttgaggataaggtgaatgatcagcggggtttagtgtttgattgtgtgcccgcggtgacgcgtagccatgtgttgactgccgagtcgggttcgattgtgtcgtgggagtatgtgcgtgacgcccctaaggctacgtcggtggttgttggtggccgcggcgagggcaaggatcggctgttttgtgaggatgttgattcgatggctgagggggattggtttgatcgtgtcgaggtgtttaaggatgcccgtaacacggattctgagaaggtgtctctctttgatgaggctgagcgggtgttgttcgagttaggggccacgtcggggtttaagatcgagttggccgagtcggatgtgttgcgttttgggcccggcaagctgatgcccggggatttgatttatgtggatgtgggttctggccctattgcggagattgttcggcagattgatgtggagtgtgattcgcctggtgacggctggacgaaggtgactcctgttgcgggggattatgaggataatccgtctgccctgttggctcgccgtgtggctggtttggctgcaggtgtgcgggatttgcaaaagttttaaaagtgatgggggtttgttgtgggtattgtgtgtaaagggtttgatggtgtgttgaccgagtatgattgggctcaaatgtctggtctgatgggtaatatgccgtcggttaaggggcctgacgattttcgtgtcggcactacggttcagggtgccacggtgttgtgtgaggttttgccggggcaggcttgggctcacggggtgatgtgcacgtcgaatagtgtggagacggtgacggggcagctgcctggtcctggtgagactcgctacgattatgtggtgttgtctcgggattggcaggagaatacggccaagttggagattgttcctgggggtcgtgcggagcgtgcccgtgacgtgttgcgtgccgagcctggcgtgtttcatcagcagttgttggctactttggtggtgtcgtctaacgggttgcagcagcagttggataggcgtgccgtggcggctagggtggcgtttggggagtctgcagcctgtgatccgacacccatggagggggatcgtgtgatggttccttcgggggccgtgtgggctaatcatgctaacgagtggatgttgttgtctcccaggattgagacgggttcgaagtcgatcatgtttggcgggtctgctgtgtatgcttacacgatcccgtttgatcgccagttcagtagtccgcctgttgtggtggcgtctatggctacggcggctgggggtacgcagcagattgatgtgaaagcctacaatataactagcaaggattttggtttggcgtttatcacgaatgatgggtctaagccgaatggtgtgcccgctgttgcgaattggatagctgtgggcgtgtgaccgtgttgaggctgtggtggcggttggtgtgatgttggggggctgtggtgtcgtggtttactcctgcactggtggcctctatttgtaccgcgttggctactgttttgggttcggttcaggctgtcacatctaagtctaggaagcgtttgaggcgcctgtctgctcaggtggatgcgatggaagagtatacgtggggtgtgcggcgtgaggttcgccggtttaacgctggtcttcccgataatgtggatcctttggtgttgcctgatccgcccgggtttttgcaggatcagttggggggtgaatagatgagggagttggaggaggagaagcggcagcgccgtacttttgagaaggcttctatggtgttgttgtttctgtcgcttgtgctgttggcggtggttgctgggggtgctttgcgtttcggctctgtggtttcgcagagggattcggagcaggcgcgtgcggagtcgaatggtactgcggctaaagggttggctgcccgtgtgaagcaggtgtgcgcccagggtaggcaggagtcggtgcgtcttcaccggtctggcctgtgtgtggatgctgcccgtacggagcggagtgttcagggtgttcctggcccggctggtgagcgtggcccgcaaggccctgccggtgtggatggccgtgatggcagtaatggttcggctggtctggttggcccggttggcccgcagggttctcctggtttgaatggtgtgaaggggcctgacgggttgcccggtgctgacggcaaggatggccatggtggtgttccgggccgtgcaggtgatgacggtgtgaacggtgctgatggtcgggatggttcggccggtgaacgcggtgatgtgggcccttcaggttccgccggtccacagggtgaacggggtgagcgcggcccgcaaggccctgccggtgtcaacggatccgatggtaaagacggtaaggatgggcgtgatggccgctcggtggtgtctgtgtactgctcggagggccgcctgtttgtgaaatatagtgacggtgcgtcttctacagtgtcagggtctagggcgtgcccgggtgtggccccgtcgccgattgtgaccgtgtcatcccacaaatagtaagaggaagggtgttactagtgttgatgatgttttggggtggtgtgcggtgagatacattccagcggcacaccattcggctggttctaattctccggtgaatagggttgtgattcatgcgacgtgcccggatgtggggtttccgtccgcctcgcgtaagggtcgggcggtgtcgacggcgaactatttcgcgtccccatcgtctggtggctctgcccattatgtgtgtgatattggggagacggtgcagtgcctgtccgagtctactattgggtggcatgccccgcctaatccgcattctttgggtatagagatttgtgcggatggcggttcgcacgcctcgttccaggttccggggcacgcgtatacgcgggagcagtggctgtcgcctgaggtgtggcctgcggtggagcgggctgctgtcctgtgtaggcggttgtgtgaccggcatggtgttccgaaacggaagctgtccgtatcggatttgaaggccggcaagaggggtgtttgcgggcatgtggatgttacggatgcgtggcatcagtcggatcatgatgatccggggccgtggtttccgtgggacaggtttatggccgtagtctgcggccacgatagtggtagtgatagtggggagttaactgtggctgatgtgaaagcgctgcatgatcagattaaacaattgtctgcgcagcttactggttcggtgaacaagctgcaccacgatgttggtgtggtacaggtgcagaatggtgacttgggtaaacgtgtcgatgccctgtcgtgggtgaagaatccggtgacggggaagctgtggcgtacgaaggatgctttgtggagtgtctggtactatgtgttggagtgtcgcagccgcattagcaggcttgagtctgatatcaatagtttaaagaagtgatgtgtggtgggtaaacagttttggttgggcctgttagagcgcgccctgaaaacttttattcaaacgtttgttgctgtgcttggggtgactgcgggtgtcacctataccgcggagtcgtttcgtgggcttccgtgggagtcagctttgatcacagccacggtggctgctgtgctgtctatagcgacttcgtttggtagcccgtcgtttgtggccggtaaacccaaggttgctccggttgttgatgccggtcttgttccacccgatgataccggcctggtagaaccgcatgcggttgacgaaacggatcctggcatgatcgagccgatggatgatgataatgtggactatgtgccgaggcgtgcatccgagtctgaggttggcacggtagagccgtcagaatcataagtgaatatagtgtgtgccccagcggtgctgccacgtgtgtggtggctgctgctggggcactatttttgtgtctactgtatggctatgattcgttgttgtcgatggtggcttcgagcatctggtgcaggtgttcacactcggatatggtgtcacgggcttgatctaaaatgtctcgccggatcacgtttttgtggttgttgctgaggctgataagcgaacacatgatatcgtcggcggcggattgtagtagtttggcctggtatgcgattccggcgagccagtctatggcttccgggcttgcctgtgtgttgtctggcatgccactggtgttgctgttgtttgtggggtatcctgcactgtcgcagtcccacaggatttcgctgcactcgtctagcgtgtcttgatcgatgttgaggttgtcgaggctgacttctttgatggtgagatttacatcatctaaagagatgtggacgtggtattcgtcttgaatgtcggccacaatgttttccagctggttcatgttggtgggctgttgttggatgattcggtgtaccgctgttttgagggcagcgtgggggatattggttgtgttgttcatggttttatttcatccctgtactatcgtcgtctatgtatgatgttgtgttggcgtatttggtgagtgtgatcagtgtttggtctgcccactgtttcaccgtctgcctagtcacacccaatcgctgggctgccaccgaataggtttgatcatacccgtatacttccctgaatgcagccagccgtgccagccgtttcctctgtttggatggttcacaggtgagggtgtagtcgtcgatggctagctgtaggtcgatcatggtaacaatgttgttgccgtggtgttgtggagcggttggcgggggtggcatacctggctctactgatggtttccatggtccgccgttccagatccattgggcggcttgaatgatgtcggctgtggtgtaggtttggttcatgtgtcacccccggaacaggttgtcgaggttgtctaggttggggctggtgtttgtggtgtcgaatcgtcctacgcagtggcagtagtcgtacatgagtttaataatgtgttgatggtcaccaaggtaggtgttgccgctgatgctgtaggtggctgtgccgtctttgctgatggtgtatttggcggtgatagtttcgggtgtttcggtgttggtgatgatggcggtggtggtggtgcctactgtttggagtacggtggtttgggttccgtcgtcgagggttgtagtaaccataatgggggttctccttttagttgctggtttgattgtcggctatagtggtgatttcttgcaccggtttggggagatccaaatgctgtatggttttgttggctagccgtttggctaccctgtagcacattttggtgtagtgtttgttgtctaggttgtggtattgttctcgcaccgcaatatatagtagggagtcttggtacaggtcgtctgcgctgattgcggggtagtgttcggctattttggcgcatgcccggttgagtgtgcgtagatgatggtctgtggcccatccccacgatgctgtggtggccaggtctgcttttgttggtcgtctactcatgacactatttcatctcgctatctggtagttgtttggtgttttgttgttgatagtgtagcacacgagtccggggttgccggtggtgcctgtgcggtgccggtaccagacggattctccttccatggatgggcattgaataaaggtgcgttgtccttgctcggagatttctaggtggtgccggtgtcctgccatgaggatgtgggatgtggtgccgttgtggaattcttggcctcgccaccattcgtagtgttggttgttgcgccattggtggccgtgggcgtgaaggattttggtgcctgccacatcgacggtagtggtcatttcgtcccggctagggaagtggaagtgaaggttgggatattggttgttgagctggtaggcttctgcgatggcccggcagcagtccacgtcgaaggagtcatcgtaggtggtgacgcctttaccgaatcgtacggcttccccatggttgcctgggatggatgtgacggtgacgttggggcagtggtcgaacatgtggatgagttgcatcatggccatgcgggtgagcctgatttgttccgtcaagggtgtttgtgtgcgccaggcgttgttgcctccttgtgacacgtatccttcgatcatgtcgccgaggaaggcgatgtggacccggccgggtttgcctgcctgttgccagtagtgtttggcggctgtgagggatcgaagatagtcgtctgcgaagtgtgctgtttcaccctgagggatgcctttgccgatttggaagtcgcctgcccctaccacaaacgcacaatcactgttgttgctggtggtgtcggctggtttggggggctgccagtcggctagcttgtcgacgagttcatccacgggatacgggtctgttgcgggttggtggtcgatgattttttgtatggatcggcctgtttctccgttggggagtgtccattcggagatgcgtgtgcggcgtacggttccattggctagatcgtcgcagatggtgtctgcttcgtcattgtgctgggctagctgtgtgaggagccggtctatattgtctatcactggttttcctcctctttctgggtgttggtttgttggcggcgatagtctttgataacggtggcggagatggggtatcctgcctgggtgagctgtttcgctagccacgaggctgggatggttttgtctgcgagcacgtcggctgcttttgccccgtagcgttgaataagggtttcagttttggttgccatgatatcctatcggttgtgtggcgggctgccatcctgtgcggcagtcgccgtcgtgtcctggtttgcgtgtgcaccaggatatggttccgtctgtgtggttgagtgttttgccgcacatgacgttttgtagatgctctggcagtgcgccgtcaccctggttgctggtttgtgtgtcgaagagtgttttctggttagtgaaatgctcggatacggtcccgttgtggacgggtagtatccatgttttccattgctgctgtagcctggtgttccagtggaattgtttggccgcgttttctgcctgttttaaggttttgtagtagccaacgagtatgcgctggtgttgctggtcgggagggtttgggcctcgccagtattgtgcggccacggcgtagcggttgctggctgtgaaggtgttccagcagtattcgataatgttgttgagtgtgtcgtctgtgaagtcgtctgggttgtgttctgttgcctgggtgataatgccgcggatggcttgccggtttttggtggcgggtttgaacgagatgctcacgatagtaccggcttgtcgtcttgcatgaactggttgaaggtgttgttcccggcgtgttgggcttgtgtgatgtcctggtcggtccagtcggggtgttgctgtttcagatagtaccagtggcacgcattgtaggtttcgtcttgtagccgtgtgagatggttttcggtgatgatttgtttccacattgtccatgacacgtcgagccggttgaggatttcgagggctgggatgttgaattggttgaggaagaggatttcgtaggtgtagtagtttttctcgtattggtcccatccgcttcggtgcctgttgggctggtttttggggtaggcttcccggcatactttgtgtaaacgtttggccatgtcgtcgggtagtttaatgtcggggttggcgcggatcatggatcgcatcccatcataggtggtgccccaggtgtgcatgatgtaggtggggtcttcaccatcggcccatttttctgcacagatggcgaggcggatgcgcctcctggctgcttggctggtgttgcgccggttggtgatggggcacgtgtcgaggggatccatgatattttagtgtacctttcttggtttgggttgcttgtgtggttttattgtagcactgtgttgagggcttgtgtcaaccctgttttgccggttttcaggtaggtgtctgtgacatccccgagggtgaggggcacatgggtggcttggggaagtgctgtctggagagtttgggccatcttatctcccgcggggtcggggtcggaccagatgtaaacatggtcgtagccttcgaagaatttggtccaaaagttttgccacgaggttgcgccgggtatggcgacggcgggccatccgcattgttcgagtatcatggagtcgaattcgccttcacaaatgtgcatttctgctgccgggttggccatggcggccatgttgtagatggagcctgtatccccggccggggttaagtatttggggtggttgtgggttttgcagtcgtgttgtagtgagcagcggaaacgcatttttcttatttcggctggccgcccccaaacggggtacatgtaggggatggtgatgcactggttgtagtcttcgtggccggggatggggtcattgtcgatgtatccaaggtggtggtagcgggctgtttcttcgctgatgcctcttgccgagagaaggtcgagtatgttttcgaggtgggtttcgtagagggccgaggctttctggattcggcggcgttccgcaatgttgtatgggtgtagtgagtcgtacattcgggttttcttcttccaatcgttgttgtagcttggcgaggccgcctccaacaccgcatgtgtggcagtaccagacgcccttgtcgaggttgatgctcatggagggctggtggtcatcgtggagtgggcagaggatgtgttgctcgtttttggacgggttatagcggatgcgataggtgtcgaggaggcggcgggtgtcagaggtgtgggaggagctcgttgagggttgataccacataggcttcgctccatggcttgtttcgctgtttcatgatgactagtccgatggtggattggttttttttgttgcggtgggtttcatagttgcgtgcctcgattgtggcttctttcacgaattgggcgagatgctgctggccagccttggcttcgatcacataggttttgttgccggttttgaggatgaggtcgccttcgtcctctttgccgttgaggtggaggcgttctatatcgtagccggtgttgcgtagctggtgtaggagtctggtttcccactcggcaccggcccggcggttgcgtgactgttgtgaaaccatcatagtcctttatgttcttgtgtcatgttccatggctgtttttctaccaatggcccgaagaatgtgtattcggggtaggccctgagtctttcgtatcgggtgccgtctgggctagatttgccggtgcgctgtttcaacacagcaatgcgtgcctcggctggtatcgatagcccgttgccgttatcctcgccaccatacaatgagactccgaggatgagttgtggtttttcggagaggccgtttttgatctctcgtctggctggcgggtgttcgaggtcggtgccggttttgtcggtggcgtggtgtgtgacgatgatggtggagccagtatcccgacccaatgctgtgatccattgcatggcttcttgttgggcttggtagtcactctcgcagtcttggatgtccatcaggttgtcgatgacaataaggggtgggaaggtgttccacatttccatgtaggcttgtagttccatggtgatgtctgtccaggtgatgggtgactggaatgagaatgtgatgtgttggccgtggtggatgctgtctcgatagtattctggcccgtagtcgtcgatgttttgttgtatctgggtggtggtgtgttgggtgttgagtgagatgattcgtgtggaggcctcccagggtgtcatgtcacctgaaatatatagtgctggctggttgagcatggcggtgatgaacatggctagcccggatttttggctgccggaccgccccgcaatcatcaccaaatcccctttgtggatgtgcatgtccaggctgcggtagaggggttctagttgtggtatgcggggcagctcggctgctgtttgggaggctctctcgaaggatcgttgtagagagagcatcgggaccttatctatctatcggtggttgtgggtggtcagatggagtcgatatcgatatcagcctctgctgatgctgaagtgtcatatagctggccattatcgcgcttgtctacgtattcggcaaccttatcatagatggcgtcatcaaggggtttgagcacaaccgcgttgaacccgtttttggtgcgcacggtggcgagtttgaaggcctgctcctcgccaaggtatgcctctagatcgcggatcatggagtgtgggcggtcgttattgccgcgcgctttctcaataatagcgttggggatggtttctggggtgccgttgttgagatcgtctagggtgtggaagatggtgacgtcggcgtagatgcggtctgcgacctgtccgccgtagccttcagtgttgtgttcgacgtcgtggactttgaaggcgatggcggtggcatcctggtttttggacgggttgaagaaggtgctgctgttgttgtttcggtagttggcgagtcccataactgtatcctttactgtttgtgttgttttgttggtttgtgtcggtttttatcgggtgaggctgtttcgtttattcctgaaagcctctgacacgtccgggttgctggtgattgtctttttgtactgtttgaggaggtcggctagctgtgccttgcttgttgctttgttgattttgtcaataacgatggtgttttcttgggatgcgatgttgtctacatagtttttggctgcctggtcgtatcggtcttggagaatgatggaggcgctcgcgatcagtgttgccaaatcccagtctttagagacgtcgtcgtttttgagtcctcccagtaaatcaatgatggattgtttgatgtcttctgtggtgtctcctctgatgactgcccacggggcggcatagtctccaccgtatttgagtgtgatagtgatacgatcatccgtactgttggtgtcggtcactggttctccttatctttctcgagtggtgtgatggtggttttgatcgggtacctgtaggcgtccttgccgtctaccgcccagcaggcgtctcgtacggggcatcctttacacagggctgtgacgtgggggacgaagatgccttggcttattcctttcattgcttgactgtacatgcatgatacatgccggtaggtgttgttgtcaagatcgtacagttcggttgatgtgccctgctcgaccgattgctcgtatcccttggtggtggcgggtgtccaaaacatgcctttcgtcacctggatgccgtgttgggcgagcatgtaccggtaggtgtgcaactgcatagcatcgactgggatgcgcccggttttcaggtcgaggataaacgtttcgccggtgttggtgtcggtgaagatgcggtcgatatagccgacaatctgtgtgccgtcggcgagggtggtttcgactgggtattcgatgcctggctggccgtcaatggttgcggtgatgtattctgggtggtttcgcctccatgttttccaccggtcgacgaagatggggccatagtgtatccaccaatcatagtttttcttgttgggcccgcctgactcgcacatgtttttgcacaccctgccggagggtttaatctgggtgccctcttctttgaccagggcgatttgggtgtcgaacacattgttgaaggatgagagtttgtcgggcagtgcagggtattcgacggggttatacaggtggaggtcatgctgttcggttatgtggtgtatagcactgccggcgatggttgcataccaggtgtggtgttgggcatggtagccgtgggatagtcgccatttttcaccgcattcggcccactgtgtgagtgaactgtaggagatgtggcctggatgctggatggttttcggatattgtgctagaggcatgttagttgtttttgttccatgggttgcgggtgtcttggccggcctggtgttgctggtatgcgaggagtgtcaggcagtgccaggctgcatgggccagatgcggcagatgtgattcatagtcgaggttgtttccttgctgccaggctagtagatgtctgtagagggcgtcgatactgtgacaccaggggtatcctccggtccagttgttgtcgccgtatttggtggcgccgtatccggctacttcgccgagcgagtggagggatgcggggtcgatgagggagagcctgcatagtttcagttcttttttggcgccggtgttggggtcggtgtacatgcgggtgggctcatccatgagatgtgtgcgcctttcttgagtgggttactggttgttgtcgtgggctagggctacggcgagaatgatgatggcgagggtttcagcgatgatgatgggtgttgtgatcatttggtgtcgcggggatggtaggtgagggttgatgcgcctaggagggtggcgagggcgcaggctgcgatgattgcgcaggctgctttgtggctagtgcctgttgcgtacatccatgtgatgatgccgccttggatccatgcgaggctggtgaagaatgtttcgtaactgtgcagctcaatgttgttgttgcgtgtgttcatgcttgttcctgaatgatggtgttgatggttttgtaaatgttgtacaggtctgtttcgatggtttttagctggctgatttggtggtcgaggttgatgttcgggttgagggtgttgatgcgggatgcgatgtcggtggctgtgcgtagtgtgccgccggtgtggtgaatgatgtgtgccgtgtcggcgaggccggtggtgacggcgtagtgggagaggagaggcatgataggtgtgctttctttctggtcagcgtgaagggttgatggacatgtcctcaacctgcggcttgtcttcggtaccggacacttggcagaaaaccttcacttgtgccttggatgccccgggttgctttgcggtggcaccgtaggcgatggagaaggtgtctttgtgggcgccgatgactttgtgtaggaagaggtcgatgtcggggtttccgttccagttgacaccttgcgctgcagccatctgggtggctttctgattgcaggcgtgtgctgccgtaatcatagtgagcccggtggaggtttcttcaccgcgggcttgcgcctgccgatgagccttggcctgctcggcttgtagggagcggactgcttctgcctgcttggctgtcttctcagccttgcgctgctgtgcggttttgggggtccattcggtgttggctgtggtggcctgtggggctggctgtgatgcgagtggcgggttgtcgtcgggggctggtaggaaggaggctgcggcgatgatggcgagggtggctccggcgatggtgtagcctgttttcttgttcatgaccgtgttcccctctcgtggggtttgttcgttgctgacatgattaatcattccatgggtggcatcggctgtcaagctgcgctcatttgggttgagcgttccttgtgtggctaggtgttttatcgggcgaatagggttaacaggtggccaacattgatgcgtgtcacattccagtagagttgtgtcgcctctgcctgtgtgagtggtttccactggttgtggctgtatacggttccgtcggtggcgatgaacgtgtcggggcgcatcttgtggagttcggcttccacatgctgccggtaggcttcggcgaggccctcaaaatccatatggtcgcagtggaggttttcgaggcgtgtcaggtcgaagggtgtggggcagtcgtagctggcggggctgtagagctgggtgaagtggtcggcgatcttttgcacgattattcctttccggtgatggtgtgttggttgtttgatcgtgtggcttcggcgatgatggcgtccacgtcgattgtgtcgatgatgtagtagagttcctcggcctcgtcctcggtgagtggctgccagttgcgtggcccgtatatggcgccgtcgagggtgacggtccattgtgggcggatgagccggatggcttcttcgactttggcacggtatagacggcagatgatagacgtctgggtgttgcctatgttgtgccctgttaggtgtgcggggtggagtgggttgatttctgtcggcccgtagagggttgtgaaggatggtgtgatgagtgttccatccacggtgggtgctcctttctggattgtttgggttgttgtggtttttatggtgtgatggttgcaaccgtgagtcaaggctgcgctcattcagcttgagcgtttcatgaggggtgtggtgtatatcactgaagcctttattgctcctgtaagcgtcttaaatggtctgggggtaggattatgcaggactaaccctgctagtcgattctagggcccttctagggcgtctcaggggtatgtctgggtgatggtaggtgttgtagatcattcggacgctcgaggttgtcatacatgacgatggttggggtgttctatctgggcataggttccactccctgtagtgtgtgagatagaccacatttccctagcctagtgtccatcaccaacaccccgcagctgatctggcgtggagggtgtagcccagaaatgccgtttaaagcttctagggtacacctaggagcgccttgcagggtgggggctaggtatttatacccccagcacattctgatcgattctagacgcctataagagctcgatacgtgatcagatcaccagacgcagaccatcctcccccatcctgcttagctaagcctacactatgtggacagtgtaggatactgtaggggaagaaagacacggtacaagaaagaagggggaggatccgccttaaagtcttagcacttaaggttttagcgcttagcaccgagccccctcaagggctcggcatcagcaccaccaggctcagctcatcaggcacagcctgaaagaggtacacgccatcagggaaggcttgagagtacgaggagccctagcgacgagtactcgaaagcctgagggaacacccttagtactgatgggcctagcgtgttcggaaaagacacacgagtcaagtgtgacagtccatcaggggtgaaacccgttctggctaggggtttcagccctaaccacccttaaaggttacaagagtctaagaaaatttaagaaaactcttaggaagaaagttgtgttcatgtccacccaaaaacagccaaaatagccctcaaacccgctaatagagccaaaccttcatgtttgactcttccagacggcgtatgctaggctggacaggtagccagctggacgcaaggccagaaagtgctgacgcacttcccgacctcgcttaccatcagtctaccaaacacttaaagaccttaagggcttagcgctaagcagcttaacacttagcaccgagcccttgaggggctcggcatcagccctaaggtacttatagtaactttaaaaccttaagagcttagcctttaaggatctaagttactataaaagctttcagaacttagtacttaatactttaagtaaacataaaagcttttaagtcttaaagtaaatatataaccttaagacttaaacattaacacctaagttaagtataaaaccttaaaggcttagcacgtaaggatctaaacttaacatcagtgtttaagactttaaaacttaaaataaaccataaagacttaaagacttataagctttaaacacttaaagtaactataagactttaaagaccttaagtacttaaagttaaccatcagtcttaaactttaatcttataacctataagtcttaaagcttataagttataaaagtttttagaagagtaaaggggttaacttctttacttctcttctctctttggttctttctctcttctcttcttttcttcatcaggggagaagaggaaccttttgccatcagcgctgatgggttttcgccgtgtgtctcgtgtgctcctggtcgcacgctcccgtcgcacactccccacactcttacacccgtgtccctttcaggcttagcgtgttcggctgaaggcgtacggcgtgtcacgctaacacccttaacatcaggtgagacttaaagtgtatattatatgtagaagactttaaaacctttaagggtgtacacgtttaggctgtgtccaacactgctaggcgcgaagtgctaagccttaaagcgctaacacacacccacccccatttttcttccgtgtccttttctttttgacaccgctggggggcgatgtgatctttctcacacccgtgggggtaggagagaaaaacaaacaccccaccacgatcacaaccccccaccaaacgaacaaaacagcccccagaatcgactggtagggcacaggtggggtaaacctaccccggacacattccaggctgttacagagacaacgagaagcttacaagggctataggtgatgaggaggcgcgatggcacacaccaaccgcaccgcatcctccgcccaccgacgctggcgcgagcgactcatcacccaagcccgacaacaaggccaaaccgaatgcccactctgcggagcaaccatcacctgggacactcaccaactaccaaccagccccgaagccgaccacatcacacccgtcagccggggaggactcaacaccctcgacaacgggcaaatcatctgcagaacatgcaacagaagcaaaggcaatcgcagcgaaccaaacatcagtttccaacaacaaaccacaaaaacccttgtcacctggtgaaaaaccagccaacccccgacggggaccaccccctgcacacccgtgcaagacc

SEQ ID NO: 40 - DNA, 29503 bp, unidentified
  source 1..29503: mol_type = unassigned DNA; note = Bacteriophage of P. acnes
agtgaaatacctcccctttgttgttttatcgttttgtcgactttttgtttggtggtgatggtggtgcagcctgagcttcccgagtctcgtgagtggtgtgaggagacgcgtcgttggtggcgtgtgtggggtgaggatgcgcgtgctgggtttgtgtctgatgaggagtggctgtttctcatggatgctgcggtgattcatgatgtggtgtggcgtgagggtcgcgcggaccttgtggcttcgcttcgtgctcatgtgaaggcgtttatgggcatgttggatcggtattcggttgatgtggcgtctggtggtagtggcgggggttctgcggtggcgatgattgacaggtatcggaagcgcaagggggcctgattaggtgtctggtgtggttggttctcaggttcctcgtcatcgtgtggcggcggcgtattcggtgtctgctggtggggatgctggtgagcttggtagggcgtatgggttgtcgcctgatccgtggcagcagcaggtgttggatgattggcttgctgttgggacgaatggccgtttggcgtctggtgtgtgtggggtgtttgtgcctcggcagaatggcaagaatgctattttggagattgtggagttgtttaaggcgactattcagggtcgccggattttgcatacggctcacgagttgaagtcggctcgtaaggcgtttatgcggcttcgatcgttttttgagaatgagcggcagtttcctgacttgtatcgtatggtgaagtcgattcgtgcaacgaatggtcaggaggctattgtgttgcatcatccggattgtgccacgtttgagcgtaagtgtggctgtccgggttggggttcggttgagtttgtggctcgtagccgggggtctgctcgcgggtttaccgttgatgatttggtgtgtgatgaggctcaggagttgtcggatgagcagttggaggctttgcttcctacagtgagcgctgccccgtctggggatcctcagcagatttttttgggtaccccgccggggccattggctgatgggtctgtggtgttacgtttgcgtgggcaggcgcttggtggcggtaaacgtatcgcgtggactgagttttcgattccggacgagacggatccggaggatttgtctcggtcgtggcggaagcttgctggggatactaatcctgcgcttggtaggcgtctgaattttggtaccgtgtctgatgagcatgagtctatgtctgctgccgggtttgctcgtgagaggcttggttggtgggatcgtggccagtctgctgtgtcggtgattcctgccgataagtgggcgctatcggcggttgatgaggtgcatctttctggtgggaaagtgtttggggtttcgttttctcgttctggtaatagggttgctttggcgggtgctggcagggcggatgctggggttcatgttgaggttattgatggcttgtcggggacgattgttgatggtgtaggccaactggctgattggctggcgttgcgttggggtgacacggaaaagattatggttgccggttctggtgcggtgcttttacagaaggctttgactgatcgtggtgtgccgggtcggggcgtgattgtggccgataccggtgtttatgttgaggcgtgccaagcttttctggagggtgtgcgttcgggtgttgtttctcatccccgtgctgattctcgccgtgacatgttggagattgctgtgaggtcggcggttcagaagcgtaagggatctgcttggggctggggctcgacgtttaaagacggcagtgaggttcctttggaggctgtgtcgctggcgtatcttggtgtgaagatggcgaaggctaagcggcgtgagcgtagtggtaggaagcgggtgtctgtggtatgaacgtggacgagttggctcttattgagggcatgtacgatcgtattaagaggttgtcttcgtggcattgccgtattgagggctactatgagggttcgaatcgtgtccgtgatttgggggttgctattcctcctgagttgcagcgtgtgcagacggtggtgtcgtggcctgggatagcggtggatgctttggaggagcgtctggattggcttggctggactaatggtgacggctacggtttggatggtgtgtattctgcgaatcggcttgctacggcgtcgtgtgatgtgcatttggatgcgctgatttttggtttgtcgtttgtggctgttattccccaagaggatgggtcggtgttggttcgtccgcagtcaccaaagaattgcaccggaaagttttcggctgacgggtcgcgtcttgatgctggcctggtggtgcagcagacgtgtgatcctgaggttgttgaggcggagcttttgcttcctgatgtgattgttcaggttgagcggcgggggtctcgtgagtgggtcgaggtgggccgtataccgaatgtgttgggtgcggttcctttggtgccgattgtgaatcggcgcaggacgtctcgtattgatgggcgctccgagattacgaggtctattcgtgcttacacggatgaagcggttcgcacgctgcttgggcagtctgtgaatcgtgatttctatgcttacccgcagcgctgggttacgggtgtttctgcggacgagttttctcagcctggctgggtgttgtctatggcttctgtgtgggctgtggataaggacgatgacggtgatactccgaatgttgggtcgtttcctgttaatagtcctaccccttattctgatcagatgcggctattagcccagttgactgctggggaggctgcggtgcctgagcgctatttcgggtttatcacgtctaacccgccgtcgggtgaggcgcttgcggcggaggagtctcgactggttaagcgtgctgagcggcgtcaaacatcgtttggtcagggctggctgtcggttggttttctggctgcgaaggcgttggattctcgcgtggatgaggctgcttttttcggtgatgtgggtttgaggtggcgtgacgcgtcaaccccgactcgggcggctacggcggatgctgtgacgaagcttgtgggtgccggtattttgcctgctgattctcggacggtgttggagatgttgggtttggatgatgtgcaggttgaggctgtgatgcggcatcgcgccgaatctgcggatccgttggctgcgttggctggggctatttctcgtcaaactggcgaggtttgatggatggcttcgggtgtgatgtcgaggctggcggcgactgagtatcagcgtgaggcggtccggtttgccgggaagtatgcgggctattatgccgagcttggtcgtttgtggcattccggaaaaatgagtgacacgcagtatgtgcgtttgtgtgtcgagttggagcgtgccggccatgatggttcggcgtcgttggcggcaaggtttgtgtcggattttcgccggttgaatggtgtggatcctggtttgattgtgtatgacgagtttgatgctgctgctgcgttggcccggtcgattgcgaccacgaagattttgaagggtgatccggatagggcgaatgatactattgatgcgatggcggcgggttttgatcgggctgtgttgaatgctggccgtgacacggttgagtggtcggcgggtgcgcagggccggtcgtggcgtcgtgtcacggatggtgatccgtgtgctttttgtgcgatgcttgcaaccaggtcggattatacgactcgggagcgtgcgctaaccgtggggcatactcggcgtcataggcggggtggtaagcgtccgctgggttcgaagtatcatgatcattgtgggtgtacggtggttgaggttgttgggcgttgggagcccagttccgcggacaccgcatatcagcgggtttatgagaaggctcgtgagtgggttgatgatcatgggttgcagcagtcgcctggcaatattttgaaggctatgcgtactgttggcgatatgagatgattgatatggtttccggttgtgcgccgccggttatcggtgcacgtggttgtctcccgcacggggggcggcaagattgtgttgttttccgcaaggagtgtagggttaggctatggccgatcagaatgttgaagaacaaaacgtcgacaaagtagaagaggttcccgaaaagggtgacgttgttgacgtcgtaaaggatgatcaaagcgggcagacaggcgatcagtcgaagcatgatggtggagataagccgtctgggactgattggaaggctgaggctcgtaagtgggagtctcgtgctaaaagtaatttcgccgagttggagaagcttcgcgcctcggatggtgatgcggggtctactattgatgagcttcgccgtaagaatgaggagctcgaagaccagattaatgggtttgttcttgagggtgtgaagcgcgaggtggctgccgagtgtggcctttcggccgatgcggtagcttttctgtctggcggtgatcgcgagtcgcttgccgagtctgctaaagcccttaaggggctgattgaccatagtggtagtggtggcgcgggtgtgcgccgtcttgcggggagtgcccccgtggatgatgttaaacgacgtgagggtgtcgcgtttgtggatgctcttgtcaataattctaggagatgatttatcatggctgacgattttctttctgcagggaagcttgagcttcctggttctatgattggtgcggtgcgtgaccgtgctatcgattctggtgttttggcgaagctttcgccggagcagccgactattttcggacctgtgaagggtgccgtgttttcgggtgttcctcgcgccaagattgttggtgagggcgaggttaagccttccgctagcgttgatgtttccgcgtttactgcgcagcctatcaaggttgtgactcagcagcgtgtctcggacgagtttatgtgggctgacgccgattaccgtctgggtgtgcttcaggatctgatttcgcctgctctgggtgcttctattggtcgcgctgtggatcttattgctttccatggtgttgatccggctacaggtaagccggctgctgctgttaaggtgtcgctggataagacgtcgaagacggttgatgccacggattctgccacgaccgatctggtcaaagcggtagggctgattgcgggtgctggtttgcaggttcctaacggtgtcgccctggatccggcgttctcgtttgcgctgtctaccgaggtgtacccgaaggggtctccgcttgccggtcagccgatgtatcctgccgccggtttcgctgggcttgataattggcgtggacttaatgttggtgcttcttcgactgtttcgggtgccccggagatgtcgcctgcctcgggtgttaaggctattgttggtgatttctctcgtgttcattgggggttccagcgtaacttcccgatcgagctgatcgagtatggcgatccggatcagactgggcgtgatcttaagggccataatgaggttatggttcgtgctgaggctgtgctgtatgtggctatcgagtctctggattcgtttgctgttgtgaaggagaaggctgcaccgaagcctaatcctccggccggtaactgatttattgtagcggtgatatgtatatgtgcagggggtggtgttgatgggtatcattttgaggcctgaggatattgagcctttcgccgatattcctaaagataagcttgaggcgatgatcgctgatgtggaggctgttgctgtcagtgtcgccccctgtatcgctaaaccggacttcaaatacaaggatgctgccaaggctattctgcgtcgtgctttgttgcgctggaatgatactggcgtgtcggggcaggtgcagtacgagtctgcgggaccgtttgcccagactacacggtctaatacgcctacgaatttgttgtggccttctgagattgctgcgttgaagaagctgtgtgagggtgacggtggggctggtaaagcgttcacgatcacacccacgatccgtggcggatatgcacattctgaggtgtgttctactgtgtggggtgagggctgttcgtgcgggtcgaatattaacggctacgctggccctttgtgggagatatgatatgattaattttccttacggtgaaacggttgtgatgcttcagccgactgttcgtgtcgatgatcttggcgacagggttgaggattggggccatcctgtagaaaccgtgtaccataatgtggccatctatgcttctgtgtcacaggaggatgaggctgccggccgtgacactgattgggagcattggtcgatgctgttcaagcagcctgtcaagggtgccgattatcggtgtcgttggcgtattcggggtgttgtgtgggaggctgacgggtctcctatggtgtggcatcacccaatgtctggctgggatgctggtacgcaggttaatgtgaagcgtaaaaagggctgatggttgtggcacgtgatgtgaatgtgaagcttaacttgccgggtattcgtgaggtgttgaagtcttctggggtgcagggcatgttggctgagcgtggcgagagggtcaagcatgcggcctctgctaatgtgggtggtaatgcttttgataaggcccagtatcgtgccgggttgtcgtctgaggtgcaggttcaccgtgttgaggctgtggctaggattggcaccacctataagggtggtaagcgtattgaggcgaagcatggcacgttggctaggtcgattggggctgcgtcgtgatcgtttacggtgatcctcgtgtgtgggctaaacgtgtgctcaaggatgatggctggctgtctgatataccgtgcacgggtactgtgccggatcaatttgagggtgacctgatttggcttgcgttggatggtggcccccagttgcatgttcgtgagcgtgtttttcttcgcgtgaatgtgttttcggatattccggatcgtgctatgtcgttggcgcgtcgtgttgaggctgtgctggctgatggtgttgatggtgatccggtggtgttttgtaggcgttctactggtcctgatttgttggttgatggtgcacgttttgatgtgtattcgctgtttgagctggtgtgccgtcctgtcgaatccgagtaaacgtatttgttttctatattttgtttttgtttgattatttttgggggttgtgatggctgctacacgtaaagcgtctaatgttcgctctgctgttaccggtgacgtctatattggtgccgctcacgccggtgacactattgatggtgttgggaagattcctgacggtcttaccgctttagggtacctgtcggatgacgggtttaagattaagcctgagcgtaaaacggatgatttgaaggcttggcagaatgcggatgttgttcgcaccgtggctacagagtcgtctatcgagatttctttccagctgatcgagtccaagaaggaggttatcgaactgttttggcagtcgaaggttactgccggagtcgattcgggttcgttcgatatttctcctggtgctacgaccggtgttcatgccctgttgatggatattgttgatggcgatcaggttatccgctactatttccctgaagctgagcttgtcgatcgtgacgagatcaagggtaagaatggcgaggtgtatgggtatggtgtcacactgaaggcgtatcctgcccagattaataagaagggtgatgcggtgtctggtcgggggtggatgacggctttaaaagctgatactcctccggttcctccgaagcctccgaagcctgagccggatcctaatccgccagccgagaactgatacatatttttgagggattgttgatagatgagtgacacaggtttcacgttgaagattggtgaccgtagttgggtgttggctgatgcagaggagacggcgcaggctgttcctgcccgtgtttttcgccgtgccgctaagattgcccagtcgggggagtctgctgatttcgcccaggttgaggtgatgttttctatgttggaggctgccgccccagcggatgctgtagaagcgcttgagggcttgcctatggtgcgtgttgccgagattttccgtgagtggatggaatacaagcctgacggtaagggtgcctctttgggggaatagtttggctccacggcctgattgatgattatcgtggggccatcgaatatgattggaggacccggttcggttgctctgtttatgatgttggtggcccggtgatgtgttggggtgaggctgtccggctggctggcgtgttgtgtactgatacgtcgagccagttggcagcccatctgaatggttggcagcgcccgtttgaatggtcggagtgggcggtgttggatatgttggatcattacaggtctgctaatagtgaggggcagccggagcctgtggcgaggccgacggatgagcgtcgggctaggtttacgtcgtctcaggtggacgatattttggcgcgtgttcgtgccggtggcggggtgtctcgcgagattaatattatggggtgaatagtgtatgtctggtgagattgcttccgcctatgtgtcgttgtatacgaagatgcccggtttgaaggctgatgttggtaaacagttgtcgggtgtgatgcctgctgagggtcagcgttcgggtagtctttttgcttccggtatgaagttggctttgggtggcgcggcgatgatgggtgccatcaatgttgccaagaagggcctgaaatcgatttatgatgtgactattggtggcggtattgctagggcgatggctatcgatgaggctcaggctaaactgactggtttgggtcacacgtcttctgacacgtcttcgattatgaattcggctattgaagctgttactggtacgtcgtatgcgctgggtgatgcggcttctactgcggctgctttgtctgcttctggtgtgaagtctggcgggcagatgactgacgtgttgaagactgtcgccgatgtgtcttatatttctggcaagtcgtttcaggatacgggcgctattttcacgtcggttatggctcgcggcaagctgcagggcgatgacatgttgcagcttactatggctggtgttccggtgttgtctttgcttgcgaagcagacgggtaaaacgtcggctgaggtgtcgcagatggtgtcgaaggggcagattgattttgccacgtttgcggctgcgatgaagcttggcatgggtggtgctgctcaggcgtctggtcagacgtttgagggcgctatgaagaatgttaagggcgctttgggctatcttggtgctacggctatggccccgtttttgaatgggttgcggcagatttttgttgcgttgaatccggttatcaagtcggtcacggattctgtgaagcccctgtttgcgtcggtggatcaggggattcagcgggtgatgccgtctattttggcgtggattaatcgtatgccgggcatgattacgagaatgaatgcacagatgcgcgccaaggtggagcagttgaagggcatttttgcgagaatgcatttgcctgtccctaaggtgaatttgggtgccatgtttgctggcggcaccgcagtgtttggtattgtggctgccggtgtggggaagcttgttgcggggtttgccccgttggcggtgtcgttgaagaatttgttgccgtcgtttggtgctttgaagggtgccgctggcgggcttggcggcgtgttccgtgccctgggtggccctgtcgggattgtgatcggcttgtttgctgccatgtttgcgacgaatgtccagttccgtgcctctgtgatgcagcttgtgggtgttgtcggtcaggcgttggggcagattatggctgctgtgcagccgctgtttggtttggttgcgggtgttgtggcccagttggcgccagtgtttggccagattattggtttggtggctggtttggctgcccagctggtgcctttgattagtatgcttgtcgcccggctagttcctgtgatcacgcagattattggtgcggtgacacaggttgcggccatgctgctgccagcactgatgccggtgttgcaggctgttatggctgtgatacggcaggttgttggcgtgatcatgcagcttgtgccggttttgatgcctgtgattcaacagattttgggtgctgtgatgtctgttctgccgcctattattggtttgatacggtcgctgataccagtcatcatgtcgattatgcgtgtagtgatgcaggttgttggtgccgtgttacaggtggtggcccgtattattccggttgtggctccggttgttggggctgtgatagggtttgttgcacgtattcttggcgctattgtgtctgccgcagcccgcattattggcgctgtaacccgtgttatcggatgggttgtgagccatctggtgtctggtgtggcgcgtatgggtacggccatcctgaatggctggaatcatattagggctttcacgtctgcgtttattaacggtttcaagtcgatcatttcgggcggcgtgaatgctgttgtggggttttttgcccggcttggttcttcggtggctagccatgttcggtctgggtttaacgcggcccgtggtgctgtttcttccgcaatgaatgctatccgtagtgtggtgtcttcggtggcgtctgctgttggcgggttcttcgggtcgatggcgtctagggttcgtagtggtgctgcgaggggctttaatggggccaggagtgcggcttctagcgctatgcacgctatgggttctgcagtgtctagcggtgtgcatagtgtgttggggttttttcggaatctgcccggtaatattaggcgtgctctcggtaatatgggatccttgttggtgtcggctggccgtgacgtggtttctggtttaggtaatggtatcaagaatgctttgagtggcctgctggatacggtgcgtaacatgggttctcaggtggctaacgcggctaaatcggtgttgggtattcattccccgtctagggtgtttcgtgatcaggttggccgccaggttgttgccggtttggctgaggggatcaccgggaatgctggtttggcgttggatgcgatgtcgggtgtggctggccgtcttccggatgctgtggatgcccggtttggtgtgcgatcgtctgtgggctcgtttacaccgtatggcaggtatcagcgtgcgagcgagaagagtgttgtggtgaatgttaacggcccgacgtatggtgatcctaatgagtttgcgaagcggattgagcggcaacagcgtgacgcgttgaacgcgttggcttacgtgtgagtgggggtgttgtgcatgtttattcctaacccgtctgatcgtgccggtttgactgttacctggtctatgttgccgttgattggtaatgatccggagcgtgtgcttcatttgacggattatacgggtgcgtctcctgtcatgttgttgaatgattcgttgcgtggtttgggtgttcctgaggtggagcatttttctcaaactcatgttggggtgcacgggtctgagtggcgcgggtttaatgtgaagcctcgcgaggtgacgttgcctgttttggtttcgggtgttgacccggatcctgcgggcgggtttcgtgacggttttttgaaagcctatgacgagttgtggtctgcgtttcccccgggcgaggtgggggagttgtctgtgaagactcctgccggtgttgagcgtgtgctaaggtgtcggtttgattcggtggatgacacgtttacggttgatccggtgaatcgtggctatgcccgctatgtgcttcatttgatagcctatgacccgttttggtatggggatgagcaaaagtttcgtttcagtaacgcgaagttgcaggattggttgggtggcggccctgtaggcaaaaacgggactgcgtttccggtggtgttgacgcctggtgttggttcgggttgggataacctgtctaataagggtgatgtgcctgcgtggcctgtgattcgtgttgaggggcctttggattcgtggtctgtgcagattgatggtttgcgtgtgtcatcagactatccggttgaggagtttgattggatcacgattgatacggatcctcgcaaacagtctgcattgttgaacgggtttgaggatgtgatggatcgtttgaaggagtgggagtttgctcctatcccgccaggcggttctaagagtgtgaatattgagatggttggtttgggtgccattgttgtgtcggtgcagtacaggtttttgagggcttggtgaatagttgatggctggtcttgtcccgcagataacattgtttacgccagactatcgtcgtgtggcgcctatcaatttttttgagtcgctaaagttgtcgttgaagtggaatggtttgtcgacgctggagttggtggtgtcgggggatcattccaggcttgacgcgttgacgaagccgggtgcacgccttgttgtcgattatggtggtggccagattttttctgggcctgtgcgtaaagtgcatggtgtgggtccttggcggtcttcgagggtgactatcacgtgtgaggatgatattcggctgttgtggcgtatgttgatgtggcctgtgaattatcgtcccggtttggtgggttcggagtggcgtgccgaccgtggttatgcccactattcgggtgcggcggagtcggttgctaagcaggtgttgggggataatgcgtggcgttttccgccaggtttatttatgaccgatgatgagcgtcgtggccgctatattaaggattttcaggtgcggtttcacgtgtttgccgataaattgttgccggtgttgtcgggggctcggatgactgtttcggtgaatcagtttgaggataaggtgaatgatcagcggggtttagtgtttgattgtgtgcccgcggtgacgcgtagccatgtgttgactgccgagtcgggttcgattgtgtcgtgggagtatgtgcgtgacgcccctaaggctacgtcggtggttgttggtggccgcggcgagggcaaggatcggctgttttgtgaggatgttgattcgatggctgagggggattggtttgatcgtgtcgaggtgtttaaggatgcccgtaacacggattctgagaaggtgtctctcttcgatgaggctgagcgggtgttgttcgagttaggggccacgtcggggtttaagatcgagttggccgagtcggatgtgttgcgttttgggcccggcaagctgatgcccggggatttgatttatgtggatgtgggttctggccctattgcggagattgttcggcagattgatgtggagtgtgattcgcctggtgacggctggacgaaggtgactcctgttgcgggggattatgaggataatccgtctgccctgttggctcgccgtgtggctggtttggctgcaggtgtgcgggatttgcaaaagttttaaaagtgatgggggtttgttgtgggtattgtgtgtaaagggtttgatggtgtgttgaccgagtatgattgggctcaaatgtctggtctgatgggtaatatgccgtcggttaaggggcctgacgattttcgtgtcggcactacggttcagggtgccacggtgttgtgtgaggttttgccggggcaggcttgggctcacggggtgatgtgcacgtcgaatagtgtggagacggtgacggggcagctgcctggtcctggtgagactcgctacgattatgtggtgttgtctcgggattggcaggagaatacggccaagttggagattgttcctgggggtcgtgcggagcgtgcccgtgacgtgttgcgtgccgagcctggcgtgtttcatcagcagttgttggctactttggtggtgtcgtctaacgggttgcagcagcagttggataggcgtgccgtggcggctagggtggcgtttggggagtctgcagcctgtgatccgacacccatggagggggatcgtgtgatggttccttcgggggccgtgtgggctaatcatgctaacgagtggatgttgttgtcttccagtattgagacgggttcgaagtcgatcatgtttggcgggtctgctgtgtatgcttacacgatcccgtttgatcgccagttcagtagtccgcctgttgtggtggcgtctatggctacggcggctgggggtacgcagcagattgatgtgaaagcctacaatataactagcaagaattttggtttggcgtttatcacgaatgatgggtctaagccgaatggtgtgcccgctgttgcgaattggatagctgtgggcgtgtgaccgtgttgaggctgtggtggcggttggtgtgatgttggggggctgtggtgtcgtggtttactcctgcactggtggcctctatttgtaccgcgttggctactgttttgggttcggttcaggctgtcacatctaagtctaggaagcgtttgaggcgcctgtctgctcaggtggatgcgatggaagagtatacgtggggtgtgcggcgtgaggttcgccggtttaacgctggtcttcccgataatgtggatcctttggtgttgcctgatccgcccgggtttttgcaggatcagttggggggtgaatagatgagggagttggaggaggagaagcggcagcgccgtacttttgagaaggcttctatggtgttgttgtttctgtcgcttgtgctgttggcggtggttgctgggggtgctttgcgtttcggctctgtggtttcgcagagggattcggagcaggcgcgtgcggagtcgaatggtactgcggctaaagggttggctgcccgtgtgaagcaggtgtgcgcccagggtaggcaggagtcggtgcgtcttcaccggtctggcctgtgtgtggatgctgcccgtacggagcggagtgttcagggtgttcctggcccggctggtgagcgtggcccgcaaggccctgccggtgtggatggccgtgatggcagtaatggttcggctggtctggttggcccggttggcccgcagggttctcctggtttgaatggtgtgaaggggcctgacgggttgcccggtgctgacggcaaggatggccatggtggtgttccgggccgtgcaggtgatgacggtgtgaacggtgctgatggtcgggatggttcggccggtgaacgcggtgatgtgggcccttcaggttccgccggtccacagggtgaacggggtgagcgcggcccgcaaggccctgccggtgtcaacggatccgatggtaaagacggtaaggatgggcgtgatggccgctcggtggtgtctgtgtactgctcggagggccgcctgtttgtgaaatatagtgacggtgcgtcttctacagtgtcagggtctagggcgtgcccgggtgtggccccgtcgccgattgtgaccgtgtcatcccacaaatagtaagaggaagggtgttactagtgttgatgatgttttggggtggtgtgcggtgagatacattccagcggcacaccattcggctggttctaattctccggtgaatagggttgtgattcatgcgacgtgcccggatgtggggtttccgtccgcctcgcgtaagggtcgggcggtgtcgacggcgaactatttcgcgtccccatcgtctggtggctctgcccattatgtgtgtgatattggggagacggtgcagtgcctgtccgagtctactattgggtggcatgccccgcctaatccgcattctttgggtatagagatttgcgcggatgggggttcgcatgcctcgttccgtgtgccggggcacgcgtatacgcgggagcagtggcttgacccccgggtgtggcctgcggtggagagggctgccgtgctgtgccggcagttgtgtgacaagtatggcgttccgaagaggaagctttctgtggcagatttgaaggccggtaaacgtggcgtgtgcgggcatgtggatgttacggatgcgtggcatcagtcggatcatgacgatccggggccgtggtttccgtgggacaaatttatggccgtagtctgcggcaaagatgatggaggggagttaactgtggctgatgtgaaagccttgcatgatcagattaaacaattgtctgctcagcttactggttcggtaaacaggctgcaccacgatgttggtgtagtacaggtacagaatggtgacttgggtaaacgggtggatgccctgtcgtgggtgaagaacccggttacggggaagctgtggcgcacgaaggatgctttgtggagtgtctggtattacgtgttggagtgtcgcagccgcattagcaggcttgagtctgatatcaatagtttaaagaagtgatgtgtggtgggtaaacagttttggttgggcctgttagagcgcgccctgaaaacttttattcaaacgtttgttgctgtgcttggggtgactgcgggtgtcacctataccgcggagtcgtttcgtgggcttccgtgggaatcggcgttgatcacagccacggtggctgctgtgctgtctatagctacctcgtttggtagcccgtcgtttgtggccggtaaacccaaggttgctccgcctgttgatgctgggcttgttccacccgacgatgtgggcctggtagaaccgcatgcggtggatgtgacggatcctggcatgatcgagccgatggatgatgagaatgtgggctatgtgccgaggcgtgcatccgagtctgaggttggcacggtagagccgtcagaatcataagtgaatatagtgtgtgccccagcggtgctgccacgtgtgtggtggctgctgctggggcactatttttgtgtctactgtatggctatgattcgttgttgtcgatggtggcttcgagcatctggtgcaggtgttcacactcggatatggtgtcacgggcttgatctaaaatgtctcgccggatcacgtttttgtggttgttgctgaggctgataagcgaacacatgatatcgtcggcggcggattgtagtagtttggcctggtatgcgattccggcgagccagtctatggcttccgggcttgcctgtgtgttgtctggcatgccactggtgttgctgttgtttgtggggtatcctgcactgtcgcagtcccacaggatttcgctgcactcgtctagcgtgtcttgatcgatgttgaggttgtcgaggctgacttctttgatggtgagatttacatcatctaaagagatgtggacgtggtattcgtcttgaatgtcggccacaatgttttccagctggttcatgttggtgggctgttgttggatgattcggtgtaccgctgttttgagggcagcgtgggggatattggttgtgttgttcatggttttatttcatccctgtactatcgtcgtctatgtatgatgttgtgttggcgtatttggtgagtgtgatcagtgtttggtctgcccactgtttcaccgtctgcctagtcacacccaatcgctgggctgccaccgaataggtttgatcatacccgtatacttccctgaatgcagccagccgtgccagccgtttcctctgtttggatggttcacaggtgagggtgtagtcgtcgatggctagctgtaggtcgatcatggtaacaatgttgttgccgtggtgttgtggagcggttggcgggggtggcatacctggctctactgatggtttccatggtccgccgttccagatccattgggcggcttgaatgatgtcggctgtggtgtaggtttggttcatgtgtcacccccggaacaggttgtcgaggttgtctaggttggggctggtgtttgtggtgtcgaatcgtcctacgcagtggcagtagtcgtacatgagtttaataatgtgttgatggtcaccaaggtaggtgttgccgctgatgctgtaggtggctgtgccgtctttgctgatggtgtatttggcggtgatagtttcgggtgtttcggtgttggtgatgatggcggtggtggtggtgcctactgtttggagtacggtggtttgggttccgtcgtcgagggttgtagtaaccataatgggggttctccttttagttgctggtttgattgtcggctatagtggtgatttcttgcaccggtttggggagatccaaatgctgtatggttttgttggctagccgtttggctaccctgtagcacattttggtgtagtgtttgttgtctaggttgtggtattgttctcgcaccgcaatatatagtagggagtcttggtacaggtcgtctgcgctgattgcggggtagtgttcggctattttggcgcatgcccggttgagtgtgcgtagatgatggtctgtggcccatccccacgatgctgtggtggccaggtctgcttttgttggtcgtctactcatgacactatttcatctcgctatctggtagttgtttggtgttttgttgttgatagtgtagcacacgagtccggggttgccggtggtgcctgtgcggtgccggtaccagacggattctccttccatggatgggcattgaataaaggtgcgttgtccttgctcggagatttctaggtggtgccggtgtcctgccatgaggatgtgggatgtggtgccgttgtggaattcttggcctcgccaccattcgtagtgttggttgttgcgccattggtggccgtgggcgtgaaggattttggtgcctgccacatcgacggtagtggtcatttcgtcccggctagggaagtggaagtgaaggttgggatattggttgttgagctggtaggcttctgcgatggcccggcagcagtccacgtcgaaggagtcatcgtaggtggtgacgcctttaccgaatcgtacggcttccccatggttgcctgggatggatgtgacggtgacgttggggcagtggtcgaacatgtggatgagttgcatcatggccatgcgggtgagcctgatttgttccgtcaagggtgtttgtgtgcgccaggcgttgttgcctccttgtgacacgtatccttcgatcatgtcgccgaggaaggcgatgtggacccggccgggtttgcctgcctgttgccagtagtgtttggcggctgtgagggatcgaagatagtcgtctgcgaagtgtgctgtttcaccctgagggatgcctttgccgatttggaagtcgcctgcccctaccacaaacgcacaatcactgttgttgctggtggtgtcggctggtttggggggctgccagtcggctagcttgtcgacgagttcatccacgggatacgggtctgttgcgggttggtggtcgatgattttttgtatggatcggcctgtttctccgttggggagtgtccattcggagatgcgtgtgcggcgtacggttccattggctagatcgtcgcagatggtgtctgcttcgtcattgtgctgggctagctgtgtgaggagccggtctatattgtctatcactggttttcctcctctttctgggtgttggtttgttggcggcgatagtctttgataacggtggcggagatggggtatcctgcctgggtgagctgtttcgctagccacgaggctgggatggttttgtctgcgagcacgtcggctgcttttgccccgtagcgttgaataagggtttcagttttggttgccatgatatcctatcggttgtgtggcgggctgccatcctgtgcggcagtcgccgtcgtgtcctggtttgcgtgtgcaccaggatatggttccgtctgtgtggttgagtgttttgccgcacatgacgttttgtagatgctctggcagtgcgccgtcaccctggttgctggtttgtgtgtcgaagagtgttttctggttagtgaaatgctcggatacggtcccgttgtggacgggtagtatccatgttttccattgctgctgtagcctggtgttccagtggaattgtttggccgcgttttctgcctgttttaaggttttgtagtagccaacgagtatgcgctggtgttgctggtcgggagggtttgggcctcgccagtattgtgcggccacggcgtagcggttgctggctgtgaaggtgttccagcagtattcgataatgttgttgagtgtgtcgtctgtgaagtcgtctgggttgtgttctgttgcctgggtgataatgccgcggatggcttgccggtttttggtggcgggtttgaacgagatgctcacgatagtaccggcttgtcgtcttgcatgaactggttgaaggtgttgttcccggcgtgttgggcttgtgtgatgtcctggtcggtccagtcggggtgttgctgtttcagatagtaccagtggcacgcattgtaggtttcgtcttgtagccgtgtgagatggttttcggtgatgatttgtttccacattgtccatgacacgtcgagccggttgaggatttcgagggctgggatgttgaattggttgaggaagaggatttcgtaggtgtagtagtttttctcgtattggtcccatccgcttcggtgcctgttgggctggtttttggggtaggcttcccggcatactttgtgtaaacgtttggccatgtcgtcgggtagtttaatgtcggggttggcgcggatcatggatcgcatcccatcataggtggtgccccaggtgtgcatgatgtaggtggggtcttcaccatcggcccatttttctgcacagatggcgaggcggatgcgcctcctggctgcttggctggtgttgcgccggttggtgatggggcacgtgtcgaggggatccatgatattttagtgtacctttcttggtttgggttgcttgtgtggttttattgtagcactgtgttgagggcttgtgtcaaccctgttttgccggttttcaggtaggtgtctgtgacatccccgagggtgaggggcacatgggtggcttggggaagtgctgtctggagagtttgggccatcttatctcccgcggggtcggggtcggaccagatgtaaacatggtcgtagccttcgaagaatttggtccaaaagttttgccacgaggttgcgccgggtatggcgacggcgggccatccgcattgttcgagtatcatggagtcgaattcgccttcacaaatgtgcatttctgctgccgggttggccatggcggccatgttgtagatggagcctgtatccccggccggggttaagtatttggggtggttgtgggttttgcagtcgtgttgtagtgagcagcggaaacgcatttttcttatttcggctggccgcccccaaacggggtacatgtaggggatggtgatgcactggttgtagtcttcgtggccggggatggggtcattgtcgatgtatccaaggtggtggtagcgggctgtttcttcgctgatgcctcttgccgagagaaggtcgagtatgttttcgaggtgggtttcgtagagggccgaggctttctggattcggcggcgttccgcaatgttgtatgggtgtagtgagtcgtacattcgggttttcttcttccaatcgttgttgtagcttggcgaggccgcctccaacaccgcatgtgtggcagtaccagacgcccttgtcgaggttgatgctcatggagggctggtggtcatcgtggagtgggcagaggatgtgttgctcgtttttggacgggttatagcggatgcgataggtgtcgaggaggcggcgggtgtcagaggtgtgggaggagctcgttgagggttgataccacataggcttcgctccatggcttgtttcgctgtttcatgatgactagtccgatggtggattggttttttttgttgcggtgggtttcatagttgcgtgcctcgattgtggcttctttcacgaattgggcgagatgctgctggccagccttggcttcgatcacataggttttgttgccggttttgaggatgaggtcgccttcgtcctctttgccgttgaggtggaggcgttctatatcgtagccggtgttgcgtagctggtgtaggagtctggtttcccactcggcaccggcccggcggttgcgtgactgttgtgaaaccatcatagtcctttatgttcttgtgtcatgttccatggctgtttttctaccaatggcccgaagaatgtgtattcggggtaggccctgagtctttcgtatcgggtgccgtctgggctagatttgccggtgcgctgtttcaacacagcaatgcgtgcctcggctggtatcgatagcccgttgccgttatcctcgccaccatacaatgagactccgaggatgagttgtggtttttcggagaggccgtttttgatctctcgtctggctggcgggtgttcgaggtcggtgccggttttgtcggtggcgtggtgtgtgacgatgatggtggagccagtatcccgacccaatgctgtgatccattgcatggcttcttgttgggcttggtagtcactctcgcagtcttggatgtccatcaggttgtcgatgacaataaggggtgggaaggtgttccacatttccatgtaggcttgtagttccatggtgatgtctgtccaggtgatgggtgactggaatgagaatgtgatgtgttggccgtggtggatgctgtctcgatagtattctggcccgtagtcgtcgatgttttgttgtatctgggtggtggtgtgttgggtgttgagtgagatgattcgtgtggaggcctcccagggtgtcatgtcacctgaaatatatagtgctggctggttgagcatggcggtgatgaacatggctagcccggatttttggctgccggaccgccccgcaatcatcaccaaatcccctttgtggatgtgcatgtccaggctgcggtagaggggttctagttgtggtatgcggggcagctcggctgctgtttgggaggctctctcgaaggatcgttgtagagagagcatcgggaccttatctatctatcggtggttgtgggtggtcagatggagtcgatatcgatatcagcctctgctgatgctgaagtgtcatctagctggccattatcgcgcttgtctacgtattcggcaaccttatcatagatggcgtcatcaaggggtttgagcacaaccgcgttgaacccgtttttggtgcgcacggtggcgagtttgaaggcctgctcctcgccaaggtatgcctctagatcgcggatcatggagtgtgggcggtcgttattgccgcgcgctttctcaataatagcgttggggatggtttctggggtgccgttgttgagatcgtctagggtgtggaagatggtgacgtcggcgtagatgcggtctgcgacctgtccgccgtagccttcagtgttgtgttcgacgtcgtggactttgaaggcgatggcggtggcatcctggtttttggacgggttgaagaaggtgctgctgttgttgtttcggtagttggcgagtcccataactgtatcctttactgtttgtgttgttttgttggtttgtgtcggtttttatcgggtgaggctgtttcgtttattcctgaaagcctctgacacgtccgggttgctggtgattgtctttttgtactgtttgaggaggtcggctagctgtgccttgcttgttgctttgttgattttgtcaataacgatggtgttttcttgggatgcgatgttgtctacatagtttttggctgcctggtcgtatcggtcttggagaatgatggaggcgctcgcgatcagtgttgccaaatcccagtctttagagacgtcgtcgtttttgagtcctcccagtaaatcaatgatggattgtttgatgtcttctgtggtgtctcctctgatgactgcccacggggcggcatagtctccaccgtatttgagtgtgatagtgatacgatcatccgtactgttggtgtcggtcactggttctccttatctttctcgagtggtgtgatggtggttttgatcgggtacctgtaggcgtccttgccgtctaccgcccagcaggcgtctcgtacggggcatcctttacacagggctgtgacgtgggggacgaagatgccttggcttattcctttcattgcttgactgtacatgcatgatacatgccggtaggtgttgttgtcaagatcgtacagttcggttgatgtgccctgctcgaccgattgctcgtatcccttggtggtggcgggtgtccaaaacatgcctttcgtcacctggatgccgtgttgggcgagcatgtaccggtaggtgtgcaactgcatagcatcgactgggatgcgcccggttttcaggtcgaggataaacgtttcgccggtgttggtgtcggtgaagatgcggtcgatatagccgacaatctgtgtgccgtcggcgagggtggtttcgactgggtattcgatgcctggctggccgtcaatggttgcggtgatgtattctgggtggtttcgcctccatgttttccaccggtcgacgaagatggggccatagtgtatccaccaatcatagtttttcttgttgggcccgcctgactcgcacatgtttttgcacaccctgccggagggtttaatctgggtgccctcttctttgaccagggcgatttgggtgtcgaacacattgttgaaggatgagagtttgtcgggcagtgcagggtattcgacggggttatacaggtggaggtcatgctgttcggttatgtggtgtatagcactgccggcgatggttgcataccaggtgtggtgttgggcatggtagccgtgggatagtcgccatttttcaccgcattcggcccactgtgtgagtgaactgtaggagatgtggcctggatgctggatggttttcggatattgtgctagaggcatgttagttgtttttgttccatgggttgcgggtgtcttggccggcctggtgttgctggtatgcgaggagtgtcaggcagtgccaggctgcatgggccagatgcggcagatgtgattcatagtcgaggttgtttccttgctgccaggctagtagatgtctgtagagggcgtcgatactgtgacaccaggggtatcctccggtccagttgttgtcgccgtatttggtggcgccgtatccggctacttcgccgagcgagtggagggatgcggggtcgatgagggagagcctgcatagtttcagttcttttttggcgccggtgttggggtcggtgtacatgcgggtgggctcatccatgagatgtgtgcgcctttcttgagtgggttactggttgttgtcgtgggctagggctacggcgagaatgatgatggcgagggtttcagcgatgatgatgggtgttgtgatcatttggtgtcgcggggatggtaggtgagggttgatgcgcctaggagggtggcgagggcgcaggctgcgatgattgcgagggctgctttgtggctagtgcctgttgcgtacatccatgtgatgatgccgccttggatccatgcgaggctggtgaagaatgtttcgtaactgtgcagctcaatgttgttgttgcgtgtgttcatgcttgttcctgaatgatggtgttgatggttttgtaaatgttgtacaggtctgtttcgatggtttttagctggctgatttggtggtcgaggttgatgttcgggttgagggtgttgatgcgggatgcgatgtcggtggctgtgcgtagtgtgccgccggtgtggtgaatgatgtgtgccgtgtcggcgaggccggtggtgacggcgtagtgggagaggagaggcatgataggtgtgctttctttctggtcagcgtgaagggttgatggacatgtcctcaacctgcggcttgtcttcggtaccggacacttggcagaaaaccttcacttgtgccttggatgccccgggttgctttgcggtggcaccgtaggcgatggagaaggtgtctttgtgggcgccgatgactttgtgtaggaagaggtcgatgtcggggtttccgttccagttgacaccttgcgctgcagccatctgggtggctttctgattgcaggcgtgtgctgccgtaatcatagtgagcccggtggaggtttcttcaccgcgggcttgcgcctgccgatgagccttggcctgctcggcttgtagggagcggactgcttctgcctgcttggctgtcttctcagccttgcgctgctgtgcggttttgggggtccattcggtgttggctgtggtggcctgtggggctggctgtgatgcgagtggcgggttgtcgtcgggggctggtaggaaggaggctgcggcgatgatggcgagggtggctccggcgatggtgtagcctgttttcttgttcatgaccgtgttcccctctcgtggggtttgttcgttgctgacatgattaatcattccatgggtggcatcggctgtcaagctgcgctcatttgggttgagcgttccttgtgtggctaggtgttttatcgggcgaatagggttaacaggtggccaacattgatgcgtgtcacattccagtagagttgtgtcgcctctgcctgtgtgagtggtttccactggttgtggctgtatacggttccgtcggtggcgatgaacgtgtcggggcgcatcttgtggagttcggcttccacatgctgccggtaggcttcggcgaggccctcaaaatccatatggtcgcagtggaggttttcgaggcgtgtcaggtcgaagggtgtggggcagtcgtagctggcggggctgtagagctgggtgaagtggtcggcgatcttttgcacgattattcctttccggtgatggtgtgttggttgtttgatcgtgtggcttcggcgatgatggcgtccacgtcgattgtgtcgatgatgtagtagagttcctcggcctcgtcctcggtgagtggctgccagttgcgtggcccgtatatggcgccgtcgagggtgacggtccattgtgggcggatgagccggatggcttcttcgactttggcacggtatagacggcagatgatagacgtctgggtgttgcctatgttgtgccctgttaggtgtgcggggtggagtgggttgatttctgtcggcccgtagagggttgtgaaggatggtgtgatgagtgttccatccacggtgggtgctcctttctggattgtttgggttgttgtggtttttatggtgtgatggttgcaaccgtgagtcaaggctgcgctcattcagcttgagcgtttcatgaggggtgtggtgtatatcactgaagcctttattgctcctgtaagcgtcttaaatggtctgggggtaggattatgcaggactaaccctgctagtcgattctagggcccttctagggcgtctcaggggtatgtctgggtgatggtaggtgttgtagatcattcggacgctcgaggttgtcatacatgacgatggttggggtgttctatctgggcataggttccactccctgtagtgtgtgagatagaccacatttccctagcctagtgtccatcaccaacaccccgcagctgatctggcgtggagggtgtagcccagaaatgccgtttaaagcttctagggtacacctaggagcgccttgcagggtgggggctaggtatttatacccccagcacattctgatcgattctagacgcctataagagctcgatacgtgatcagatcaccagacgcagaccatcctcccccatcctgcttagctaagcctacactatgtggacagtgtaggatactgtaggggaagaaagacacggtacaagaaagaagggggaggatccgccttaaagtcttagcacttaaggttttagcgcttagcaccgagccccctcaagggctcggcatcagcaccaccaggctcagctcatcaggcacagcctgaaagaggtacacgccatcagggaaggcttgagagtacgaggagccctagcgacgagtactcgaaagcctgagggaacacccttagtactgatgggcctagcgtgttcggaaaagacacacgagtcaagtgtgacagtccatcaggggtgaaacccgttctggctaggggtttcagccctaaccacccttaaaggttacaagagtctaagaaaatttaagaaaactcttaggaagaaagttgtgttcatgtccacccaaaaacagccaaaatagccctcaaacccgctaatagagccaaaccttcatgtttgactcttccagacggcgtatgctaggctggacaggtagccagctggacgcaaggccagaaagtgctgacgcacttcccgacctcgcttaccatcagtctaccaaacacttaaagaccttaagggcttagcgctaagcagcttaacacttagcaccgagcccttgaggggctcggcatcagccctaaggtacttatagtaactttaaaaccttaagagcttagcctttaaggatctaagttactataaaagctttcagaacttagtacttaatactttaagtaaacataaaagcttttaagtcttaaagtaaatatataaccttaagacttaaacattaacacctaagttaagtataaaaccttaaaggcttagcacgtaaggatctaaacttaacatcagtgtttaagactttaaaacttaaaataaaccataaagacttaaagacttataagctttaaacacttaaagtaactataagactttaaagaccttaagtacttaaagttaaccatcagtcttaaactttaatcttataacctataagtcttaaagcttataagttataaaagtttttagaagagtaaaggggttaacttctttacttctcttctctctttggttctttctctcttctcttcttttcttcatcaggggagaagaggaaccttttgccatcagcgctgatgggttttcgccgtgtgtctcgtgtgctcctggtcgcacgctcccgtcgcacactccccacactcttacacccgtgtccctttcaggcttagcgtgttcggctgaaggcgtacggcgtgtcacgctaacacccttaacatcaggtgagacttaaagtgtatattatatgtagaagactttaaaacctttaagggtgtacacgtttaggctgtgtccaacactgctaggcgcgaagtgctaagccttaaagcgctaacacacacccacccccatttttcttccgtgtccttttctttttgacaccgctggggggcgatgtgatctttctcacacccgtgggggtaggagagaaaaacaaacaccccaccacgatcacaaccccccaccaaacgaacaaaacagcccccagaatcgactagtagggcacaggtggggtaaacctaccccggacacattccaggctgttacagagacaacgagaagcttacaagggctataggtgatgaggaggcgcgatggcacacaccaaccgcaccgcatcctccgcccaccgacgctggcgcgagcgactcatcacccaagcccgacaacaaggccaaaccgaatgcccactctgcggagcaaccatcacctgggacactcaccaactaccaaccagccccgaagccgaccacatcacacccgtcagccggggaggactcaacaccctcgacaacgggcaaatcatctgcagaacatgcaacagaagcaaaggcaatcgcagcgaaccaaacatcagtttccaacaacaaaccacaaaaacccttgtcacctggtgaaaaaccagccaacccccgacggggaccaccccctgcacacccgtgcaagacc

SEQ ID NO: 41 - DNA, 29467 bp, unidentified
  source 1..29467: mol_type = unassigned DNA; note = Bacteriophage of P. acnes
agtgaaatacctcccctttgttgttttatcgttttgtcgactttttgtgttggtggtgagtgtggtgcagcctgagcttcctgatagtcgcgattggtgtgatgagactaggcgttggtgggatgtgtggggtgaggatcctcgtgcgcaatatgtgagcgatgaggagtggctgtttttgttggatgctgcggtgattcatgatgtggtgtggcgtgagggtcgtgctgatttggtggcttctttgcgtgctcatgtgaaggcgtttatggccatgttggatcggcattcggttgatgtggcgtctggtggccgtggtggcggttctgcggtggcgatgattgaccggtataggaagcgtaaaggggcctaatgtcgagcgttgttggttctcaggtgcctcgtcaccgggttgctgcggcgtattcggtgtctgctggcggtgatgctggggagttgggtcgtgcgtatgggttgacgcctgatccgtggcagcagcaggtgttggatgattggctggctgtcggtagtaatggcaggcttgcttcgggtgtgtgtggggtgtttgtgcctcgccagaatggcaagaatgcgatccttgaggttgtggagttgtttaaggcgactattcagggtcgccgtattttgcatacggctcacgagttgaagtcggctcgtaaggcgtttatgcggttgaggtcgttttttgagaatgagcggcagtttcctgacttgtatcgtatggtgaagtcgattcgggcgacgaatggtcaggaggctattgtttttcatcatccggattgtgccacgtttgagcgtaagtgtggttgtccgggttggggttcggtggagtttgtggcccgcagtcggggttctgctcgcgggtttacggttgatgatttggtgtgtgatgaggctcaggagttgtcggatgagcagttggaggctttgcttcctacggtgagcgctgccccgtctggtgatcctcaacagattttccttggtaccccgcctgggccgttggcggacggtagtgtggtgttgcgtcttcgtgggcaggctttgtcgggtggtaagaggtttgcgtggacggagttttcgattcctgacgagtctgatccggatgatgtgtcgcggcagtggcggaagcttgctggtgacactaatcctgcgctgggtaggcgtctgaattttgggacagtctcggatgagcatgagtcgatgtctgctgccgggtttgctcgggagcggcttggctggtgggatcgtggccagtctgctgcgtctgtgattccggcggataagtgggcacaatctgcggtggatgaggcggctctggttggtgggaaagtgtttggtgtctcgttttctcgttctggggatcgggttgctttggcgggtgccggccggactgatgctggggttcatgttgaggttattgatgggctgtcggggacgattgttgatggtgtgggccggttggctgactggttggcggttcgttggggtgatactgacaggatcatggttgccgggtctggtgcggtgttgttgcagaaggcgttgacggatcgtggtgttccgggccgtggcgtggtggttgccgatactggtgtgtatgtggaggcttgtcaggcgtttcttgagggtgttcgttcgggtgttgtgtctcatcctcgtgctgattctcgccgtgacatgttggatattgctgtgaggtcggctgtgcagaaacgtaaggggtctgcgtggggttggggttcctcgtttaaggatggttctgaggttcctttggaggctgtgtcgttggcgtttttgggggctaaacgtgttcgtcgtggccgtcgggagcgtagtggtaggaagcgggtgtctgtggtatgaactcggatgagttggctctgattgagggcatgtacgatggtatccaaaggttgtcttcgtggcattgtcgcattgagggctactatgagggctctaatcgggtgcgtgatttgggggtggctattccgccggagttgcagcgtgtgcaaacggtggtgtcgtggcctgggattgcggtggatgctttggaggagcgtctggattggcttggctggactaatggtgacggctacggcctggatggtgtgtatgctgcgaatcggcttgctacggcttcgtgtgatgtgcatttggatgcactaatttttgggttgtcgtttgtggctgttatcccccagggggatgggtcggtgttggttcgtccgcagtcaccaaagaattgcacaggccggttttctgccgatgggtctcgtttggatgctggccttgtggtgcagcagacgtgtgatcctgaggttgttgaggcggagttgttgctgcctgatgtgattgttcaggtggagcggcggggctcgcgtgaatgggttgagacgggccgtatcgtgaatagtcttggtgcggttccgttggtgcctattgtgaatcgtcgccgtacttctaggattgatggccgttcggagattacgaggtctattagggcttacacggatgaggctgtgcgcacactgttggggcagtctgtgaatcgtgatttttatgcgtatcctcagcgttgggtgactggcgtgagcgcggatgagttttcgcagcctggctgggtcctgtcgatggcttctgtgtgggctgtggataaggatgatgatggtgacactccgaatgtggggtcgtttcctgtcaatagtcctacaccgtattcggatcagatgagactgttggcgcagttgactgcgggtgaggcggctgttccggaacgctatttcgggtttatcacgtctaacccacctagtggggaggctttggctgccgaggaatctcggcttgtgaagcgtgctgaacgcaggcagacgtcgtttggtcagggctggctgtcggttggtttcctggctgccaaggcgttggattctcgtgttgatgaggccgcgttttttggtgatgttggtttgcgttggcgtgatgcttcgacgcctacccgggcggctacggctgatgctgtgacgaagcttgttggtgccggtattttgcctgctgattctcgtacggtgttggagatgttggggcttgatgatgtgcaggttgaggctgtgatgcgtcatcgtgctgagtcgtctgacccgttggcggcactggctggggctatatcgcgtcaaactaacgaggtatgataggcgatggcttcgggtgctatgtcgaggtttgctgcgactgagtatcagcgtgaggcggtcaggtttgctgggaagtatgcgggctattatgccgagttgggtcgtttgtggcattccgggaagatgacagatgcgcagtatgttcgtttgtgtgtggagttggagcgtgccggccatgatggttcggtatcgttggctgccaggtttgtgtcggattttcgccggttgaatggtgtggatcctggtttgattgtgtatgacgagtttgatgctgcggcggctttggctaggtcgttttcgactatgaagattcttgagagtgacccggatagggcgaatgatacgattgatgcgatggctgcgggttttgatcgggctgttatgaatgctggccgtgacacggttgagtggtcggcgggtgcgcagggtaggtcgtggcgtcgggttactgatggtgatccgtgtgctttttgtgccatgttggctacgaggtcggattatacgactaaggagcgggcgcttactactggtcatacgcggcgtcataagcgtggtggtaagcgtccgtttggttcgaagtatcatgatcattgtggttgtacggtggttgaggttgttggcccttgggagccaaatagggctgatgccgagtatcagaggacgtatgagaaggcccgtgagtgggttgatgatcatgggttgcagcagtcgcctggtaatattttgaaggctatgcgtactgttggtggcatgagataatttgatgtggtttccggttgtgcgccgccggttattggtgcacagggttgtctcccgcacgggggtcaacaatgttgtgttgttttccgcaaggagtgtagggttaggctatggccgatcagagtgttgaggaacagaatgttgacaatgatgttgtggagtccggaaaggataacggcattgttgatacagtaaaagacgatggcgggcaggaggtagccgacaatcagttgaagaatgaaggcgagggtaaatcgccggggactgattggaaggcggaggcccgtaagtgggagtctcgtgctaaaagtaatttcgccgagttggagaagcttcgtacatcgagtgacgattctggatctactattgatgagcttcgccgcaagaatgaggaactcgaagacaggatcaacgggtttgttcttgagggtatgaagcgcgaggtggcttcagagtatggtttgtccagtgatgcgatcgctttcttgtcgggtggcgataaggagtcgcttgccgagtctgcgaaagctttgaagggtttgatcgaccatagtagtggtggcgcgggtgtgcgccgtcttgcggggagtgcccccgttgatgatgttaaacgacgtgagggtgtcgcgtttgtggatgctcttgtcaataattctaggagatgatttctgatggctgacgattttctttctgcagggaagcttgagcttcctggttctatgattggtgcggttcgtgaccgtgctatcgattctggtgttttggcgaagctttcgccggagcagccgactattttcggcccggtgaagggtgccgtgtttagtggtgttcctcgcgctaagattgttggtgagggcgaggttaagccttccgcgtctgctgatgtttcggcgtttactgcgcagcctatcaaggttgtgactcagcagcgtgtctcggacgagtttatgtgggctgatgctgattaccgtctgggtgttttgcaggatctgatttcgcctgctcttggtgcttcgattggtcgcgctgttgatcttattgctttccatggtattgatccggctacgggtaagcctgctgcggctgtcaagtcttcgctggataatacgaagcatattgttgatgccacggattctgctacgaccgatctggtcaaggctgtcggccttatcgctggggccggtttgcaggttcctaacggtgttgctttggatccggcgttctcgtttgctttgtctactgaggtgtatccgaaggggtctccgcttgctggtcagccgatgtatcctgccgccggttttgccggtttggataattggcgcggtctgaatgttggttcttcttcgactgtttcgggtgccccggagatgtcgcctgcttctggtgtgaaggctattgttggtgatttctctcgtgttcattggggtttccagcgtaacttcccgatcgagcttatcgagtatggtgacccggatcagactgggcgtgatctgaagggccataatgaggttatggttcgtgccgaggctgtgctgtatgtggctatcgagtcgcttgattcgtttgctgttgtgaaggagaaggctgccccgaagcctaatcctccggccgagaactgattcatttgttgcggtgatatgtatatgtgcagggggtggtgttgatgggtatcattttgaagcctgaggatattgagcctttcgccgatattcctagagagaagcttgaggcgatgattgccgatgtggaggctgtggctgtcagtgtcgccccctgtatcgctaaaccggatttcaaatacaaggatgccgctaaggctattctgcgtagggctttgttgcgctggaatgataccggggtttctgggcaggtgcagtatgagtctgcgggtcctttcgctcagactacacggtctagtactcccacgaatttgttgtggccttctgagattgccgcgttgaagaagttgtgtgggggtgatggtggggctggtaaagcgttcactattacaccgaccatgaggagtagtgtgaatcattctgaggtgtgttccacggtgtggggtgagggttgctcgtgcgggtcgaatattaacggctacgctggccctttgtgggagatatgatatgaccagttttccttatggtgaaacggttgtgatgcttcaaccgactgttcgtgtcgatgatcttggtgacaaggtggaagactggtctaagcctgtcgagactgggttccataacgtggccatctatgcttccgtttcgcaggaggatgaggccgcggggcgtgactctgactatgagcattggtcgatgcttttcaagcagcctgttgtgggcgctgattatcgttgcaggtggcgtatccggggtgttgtgtgggaggctgacgggtctcctatggtgtggcatcatccgatgtccggctgggatgcgggcacgcagatcaatgtgaagcgtaagaagggctgatgggtagtggctcaggatgtgaatgtgaagctgaacttgccgggtattcgtgaggtgttgaagtcttctggggtgcaggctatgttggctgagcgtggcgagcgtgtcaagcgtgcagcctcggcgaatgtgggcggtaacgctttcgataaggcccaataccgtaatggtttgtcgtcagaggtgcaggttcaccgtgttgaggctgtcgctcgtataggcaccacatataagggtgggaagcgtattgaggcgaagcatggcacgctggctcgttcgattggggctgcgtcgtgatcgtttacggtgatccgcgtgtgtgggctaaacgcgtgctcaaggatgatggctggctgtctgatataccatgcaccgggacagtgccggatagttttgagggtgaccttatttggttggctcttgatggtggtccgcagttgcatgtgcgtgagcgtgtttttttgcggatgaacgtgttttctgatacgccggatcgtgctatgtcgctagccaggcgggtggaggctgtgctggctgatggtgtggacggtgaccctgtggtgtactgtaaacggtctactggccctgatttactggttgatggtgcacgttttgatgtgtattcgctgttcgagctgatatgcaggcctgcggagtctaaataagcttattgtttttgttttaatgtaattgtttgatatttaatgggggttgtgatggctgcaacacgtaaagcgtctaatgttcgttcagcggttactggcgacgtttatattggtgacgcgcacgcgggtgatactattaagggtgtggaggcggttccttccgggcttacagctttagggtatctgtcggatgacgggtttaagattaagcctgagcgtaaaacggatgatttgaaggcttggcagaatgcggatgttgttcgcacggttgctaccgagtcttctatcgagatttctttccagctgatcgaatccaaaaaagaggttatcgagctgttttggcagtcgaaggttactgccggatccgattcgggttcgttcgatatttctccgggtgccacgacgggtgttcacgccctgttgatggatattgttgatggggatcaggttattcgctactatttccctgaggttgagcttatcgatcgtgacgagatcaagggtaagaatggtgaagtgtacgggtatggtgtgacgttgaaggcttatcctgcccagattaataagactggtaatgcggtgtcgggtcgggggtggatgacggctttaaaagctgatactcctccggttcctccttccccgaagcctccgaagcctgagccggatccgaatccgccgtctaataactgatacacatagtttgagggattgttgatagatgagtgatacaggttacacattaaagatcggtgaccgtagctgggtgttggcggatgcggaggagacggctcaggctgttcctgcccgcgttttccgtcgtgcagctaagattgcccagtcgggggagtctgcggatttcgctcaggttgaggtgatgttttctatgttggaggctgccgccccggctgacgcagtggaggccctggaggggcttcctatggttcgtgtggccgagattttccgccagtggatggaatacaagcctgacggtaagggtgcctcgctgggggaatagtttggctccacggcctgattgatgattatcgtggggccatcgaatacgatttccgcaccaagtttggtgtttctgtttatagtgttggtggcccgcagatgtgttggggtgaggctgtccggctggctggtgtgttgtgtaccgatacgtctagccagttggcggcccaccttaatggttggcagcgcccgtttgagtggtgcgagtgggcggtgttggacatgctggatcattacaggtctgctaatagtgaggggcagccggagcctgtggcgaggcctacggatgagcgtagggcccggtttacgtctgggcaggtggacgatattttggcgcgtgttcgtgccggtggcggggtgtctcgcgagattaatattatggggtgaatagtgtatgtctggtgagattgcttccgcatatgtgtcgttgtatacgaagatgcctggtttgaaggctgatgttggtaaacagttgtctggtgtaatgccggctgagggtcagcgttcgggtagtctttttgctaagggcatgaagttggctcttggtggtgccgcaatggtgggtgccatcaatgttgctaagaagggcctcaagtcgatttatgatgtgactattggtggcggtattgctagggcgatggctatcgatgaagctcaggctaaactgactggtttgggtcacacgtcgtctgacacgtcttcgattatgaattcggctattgaggctgtgactggtacgtcgtatgcgttgggggatgcggcttctactgcggcagcgttgtctgcttctggtgtgaagtctggcgggcagatgacggatgtgttgaagactgtcgccgatgtgtcttatatctcgggtaagtcgtttcaggatacgggtgctatttttacgtctgtgatggctcgcggtaagttgcagggcgatgatatgttgcagcttacgatggcgggtgttcctgtgctgtctttgcttgccaggcagacgggtaaaacgtctgctgaggtgtcgcagatggtgtcgaaggggcagattgattttgccacgtttgcggctgcgatgaagcttggcatgggtggtgctgcgcaggcgtctgggaagacgtttgagggcgctatgaagaatgttaagggcgctttgggttatctgggtgccacggctatggcgccgtttcttaacggcctgcggcagatttttgttgccttgaatccggttattaagtctatcacggattctgtgaagccgatgtttgcgtcggtggatcaggggattcagcgtatgatgccgtctattttggcgtggattaatcgtatgccgggcatgatcactcgaatgaatgcacagatgcgcgccaaggtggagcagttgaagggcatttttgcgagaatgcatttgcctgtccccaaagtgaatttgggtgccatgtttgctggcggcaccgcagtgtttggtattgttgcggccggtgtcgggaagcttgtcgcagggtttgccccgctggcggttgcgttgaagaatctactgccgtcgtttggtgctttgaagggtgccgccggggggcttggcggcgtgtttcgcgccctgggtggccctgtcgggattgtgattggcttgtttgcggccatgtttgctacgaatgcccaattccgtgccgctgttatgcagcttgtgggtgtggttggccaggctttggggcagatcatggccgctgtgcagcccctgtttggtttggttgccggggttgtggcccagttggcgccagtattcggccagattatcggtatggttgccggtttggctgcccagctggtgcctttgattagtatgcttgtcgcccggctggttcccgtgatcacgcagattattggtgcggtgacacaggttgctgcaatgttgttgccggcgttgatgccggttattcaggctgttgttgctgtgatacggcaggttgttggtgttgtgatgcaactggtgccggttttgatgccggtgattcaacagattttgggtgcggtcatgtctgtgctgccacctatcatcggccttatccgttcgttgataccagtcatcatgtcgattatgcgtgtggtgatgcaggttgttggtgccgtgctacaggtggtggcccgcattattccggttgtgatgccaattgtgacagctgtgatcgggtttgttgcacgtattcttggtgctattgtgtctgctgcagcccgcattattgggactgtcacccgtgtcattggatgggttgtggcccattttgtgtctggtttggcgcgtatgggttcggttattcaggctggctggaatcatattagggcgtttacgtctgcgtttattaacggtttcaagtcggtgatttctggcggtgtgaacgcggttgtggggttttttgctcggctgggttcttctgttgcttctcatgtgaggtctggttttaacgcggctcgtggcgctgtttcttctgcgatgaatgctatccggagtgtggtgtcttcggtggcgtctgctgttggcgggtttttcagttcaatggcttctcgggttcgtagtggtgctgtgcgcgggtttaatggtgcccggagtgcggcttcttctgctatgcatgctatggggtcggcggtgtctaacggtgtgcatggtgtgctgggttttttccggaatttgcctggtaatattcggcatgctctcggcaatatggggtccttgttggtgtctgctggccgtgatgtggtgtctggtttgggtaatggtatccggaatgctatgagtggcttgttggatacggtgcgtaatatgggttctcaggttgctaatgcggcgaagtcggtgttgggtattcattccccgtctcgggtgtttcgtgaccaggttggccgccaggttgttgccggtttggctgaggggatcaccgggaatgctggtttggcgttggatgcgatgtcgggtgtggctggccgtcttccggatgctgtggatgcccggtttggtgtgcgatcgtctgtgggctcgtttaccccgtacgaccggtatcggcgtgcgagtgagaagagtgttgtggtgaatgtgaatggcccgacgtatggtgatcctaacgagtttgcgaagcggattgagcggcagcagcgtgacgctttgaatgcgttggcttacgtgtgattgggggtgtggttcatgtttattcctgacccgtctgatcgttcgggtttgactgtgacatggtttatggatccgctgtttggtggggagcgtgtgcttcatttgacggattacacgggtgcgtctcctgtcatgttgttgaatgattcgttgcgcggtttgggtgttcccgaggtggagcatttttctcaaactcatgttggggtgcacggctcggagtggcgcgggtttaatgtgaagcctcgcgaggtgacattaccggttttagtgtcgggtgttgacccggatccggatggcgggtttcgtgacggttttttgaaggcgtctgacgcgttgtggtctgcgtttcctccgggcgaggtaggggagttgtccgtgaagactcctgccggtgttgagcgtgtgctaaggtgtcggtttgattcggttgatgacatgtttacggttgatccggttaatcgtggctatgcgcgctatctgttgcatttgacagcttatgatccgttttggtatggggatgagcaaaagtttcgttttagtaacgcgaagttgcaggattggttgggtggcggccctgtcggcaaggatggtacggcgtttcctgtggtgttgacgcctggtgttggttcgggttgggataatctgtctaataagggtgatattcctgcgtggcctgtgattcgtgttgaggggcctttggagtcgtggtctgtgcagattgatggtttgcgtgtgtcttctgattatcctgtcgaggagtttgattggatcactattgatacggatcctcgtaaacagtctgcattgttgaacgggtttgaggatgtgatggatcgtttgaaggagtgggagtttgcgcctatcccgcctggcggttctcggagtgtgaatattgagatggttggtttgggtgccattgttgtgtcggtgcagtacaggtttttgagggcttggtgaatagttgatggctggtcttgttccgcatgtaacgttgtttacgcctgattatcgccgtgtggcgcctatcaatttttttgagtcgttgaagttgtcgttgaagtggaatggtttgtcgacgctggagttggtggtgtctggggatcattctaggcttgacgggttgacgaggccgggtgcacggctggttgttgattatggtggtggccagattttttctgggcctgtgcgtcgggttcatggtgtgggtccgtggcgttcttcgcgggtgactatcacgtgtgaggatgatattcgcctgttgtggcgtatgttgatgtggcctgtgaattatcgccccggtttggtgggttcggagtggcgtgcggacagggattatgcccactattcgggttcggcggagtcggtggctaagcaggtgttgggggataatgcttggcgtttttcgcctggtttgtttatgaccgatgatgagagtcgtggccgctatattaaggattttcaggtgcggtttcacgtggtcgccgataaactgttgccggtgttgtcgtgggctcggatgactgtttcggtgaaccagtttgagaatgtggtgaaggatcagcgtggtttggtgtttgattgtgtgcccgcggtgacgcgtagccatgtgttgactgccgagtcgggttctattgtgtcgtgggagtatgtgcgtgacgccccgaaggctacttcggtggtggttggtggccgcggcgaaggcaaagatcggctgttttgcgaggatgttgattcgatggccgaggatgactggtttgatcgtgtcgaggtgtttaaggatgcccgtaacacggattctgaacatgtgcatctcatcgatgaggctgagcaggtgttgtccgagttaggggccacgtcggggtttaagatcgagttggccgagtcggatgtgttgcgttttgggccaggcaatctgatgccaggggatttgatttatgtggatgtgggctcggggcctattgaggagattgttcggcagattgatgtggagtgtgattcgccgggtgacggctggacgaaagtgacaccggttgcgggggattatgaggataatccgtcggcgttgttggctcgccgtgtggctggtttggctgcgggtgtgcgggatttgcaaaaattctaattgttgggggtttgttgtgggtattgtgtgtaaagggtttgatggtgtgttgaccgagtatgattgggctcaaatgtctggtctgatgggtaatatgccgtcagttcatgggcctgacgattttcgtgtgggcactactgttcagggtgctacggtgttgtgtgaggtcctgccggggcaggcttgggctcacggggtgatgtgcacgtcgaatagtgttgagacggtgacggggcagctgcctggtcctggtgagactcgctacgattatgtggtgttgtctcgggattgggagcagaatacggccaagttggagattgttcctggggggcgtgcggagcgtgccagggatgtgttgcgtgccgagcctggcgtgtttcatcagcagttgttggctactttggtgttgtcgtctaacgggttgcagcagcagttggataggcgtgccgtggcggctagggttgcgtttggggagtctgctgcgtgtgatcctacccctgtggagggtgaccgtgtgatggttccttcgggggctgtgtgggctaaccatgctaacgagtggatgttgttgtctcccaggattgagacgggttcgaagtcgatcatgtttggcgggtctgctgtgtatgcttacacaattccgtttgagcgcccgtttggtagtgcgcctgttgtggtggcgtctatggctacggcggctggtggtacgcagcagattgatgtgaaagcctacaatgtgactgccaaggattttagtttggcgtttattacgaatgatggttcgaagcctaacgatgtgcccgcaatagctaactggattgctgtcggcgtgtgactgtacaggtgttgtggcggatgttgtaatgttggggggctgtggtgtcgtggtttactcctgcactggtggcctctatctgtaccgcgttggccacgattttgggttcagttcaggcggtcacatctaaatcgaggaagcgtttacgcaggctatctgcgcaggttgatgcgatggaagagtatacgtggggtgtgcggcgtgaggtgcgccggtttaacgcgaggcttcctgatggggtggagcctatgcatcttcctgatttgcctgagtttttgaaagatactgttgagggtggaggtgagtagggttgagggagttggaggaggagaagcggcagcgccgcaattttgagaaggcttccctggtgttgctgttcctgtcgcttgtgctgttgacggtggttgccgggggtgctttgcgtttcggatcgctgtcttctgagcgggattctgagcaggcgagggcccagtcgaatggtacagccgctaaggatttagccaaccgtgtgcggcaggtgtgtgcgcagggcggccaggagtcggtgcggcttcaccggtctggtttgtgtgtggatgcggtgcgtgttgagcggagtgtgcagggtgtgcctggccctgccggtgtgcgtggccagcaagggcccgccggtgctgacggccgggatggcagtaatggttcggctggtgttgttggccctgttggtccgcagggttccccgggtttgaatggtgtgaaaggacctgacgggttgcctggggctagcggcaaggatggccatgatggtgttccgggccgtgcaggtgttgacggcgttgccggggttgatggtaaagatggtgcgaatggcgccgatggtgagcgcggtgatgtgggcccttcaggtcctgccggcccgcaaggtgcacagggtgaacggggtgagcgcggcaacgccggtgcgaacggatccgagggtaaagacggtaaggatggccgttccgtggtgtccgtgtactgttctgagggtcgcctggttgtgaaatatagtgacggtgtggcttctacaatatcgggctcggtggcctgccagggtgtgaggccgtcgcctatagtgaccatatcatcccacaaatagaaaggagtggctgtgatggtagtgtttggtggtggtgtgtggtgaggtttattcctgcggcgcatcactcggccggttcgaatagtccggtgaaccgggttgtgattcatgcgacgtgcccggatgtggggtttccgtctgcctctcgtaaggggcgggcggtgtctacggcgaactattttgcttccccatcgtcgggtggttcggcgcattatgtgtgtgatattggggagacggtgcagtgcctgtcagaggggactattggttggcatgccccaccgaatccgcatagtttgggtatagagatttgcgcggatgggggttcgcacgcctcgttccgtgtgccggggcatgcttacactcgtgagcagtggcttgatccgcaggtgtggcctgccgtggagagggcggcggtgctgtgccggcagttgtgtgacaagcatggtgttccgaagaggaaactgtctgtggccgatttgaaggccggtaaacggggtgtgtgtggccatgtggatgttacggatgcgtggcatcagtcggatcacgatgatcctgggccgtggtttccgtgggacaaatttatggccgttgtcaacggcggcagtggagatagtggggagttaactgtggctgatgtgaaagccttgcatgatcagattaaacaattgtctgctcagcttactggttcggtgaataagctgcaccatgatgttggtgtggttcaggttcagaatggtgatttgagtaagtgtgttgaagccttgtcgtgggtgaagaatccggtgacagggaagctgtggcgcaccaaggatgctttgtggagtgtctggtattacgtgctggagtgtcgcagccgcatagacaggcttgagtcgactgtcaacggtttgaaaaagtgatggtggtttgttgtgggtaaacagttttggttgggcttgtttgagcgtgccctgaaaacttttattcaaacgtttgttgctgtgttgggtgtgacggcgggtgtcacgtatactgcggagtcgtttcgcggtttgccgtgggagtctgccctgattacggccggggttgctgcaatactgtcggttgctacctcgtttggtagcccgtcgtttgtggccggcaaacctaaaaccacggttgtggatgctgagcttgttccacccgacgatgggggcatggttgagccgcactcggtggatgtgtcggatcctggcatgatcgagccgacagatgatgttgatggttttgccggctatgtgccgaggcgtgccgccgagtcggaggttggcacggtagagtctactgttgcataattgaatatgtgtgtgtgccccagcggtgctgccacgatcgtgtggtggttgccgctggggcactatttttgtgtctatagtattctatgattcgttgttgttgatggtttcctcaatcgtctgatacaggtggaggcaggtagagatagtttcgttggcctggtctagaacgttctggccgataacatttttgtggttgtcgcggtggcagatgatagaccgcatgatatcgtcggccgcagattgtagtagtttggtttggtatgcgattccggcgagccagtctatggcttcctggcttgccagtgtgtcgtctggaatgtcactggtgttgctgttgtttgtggggtatcctgcactgtcgcagtcccacaagatttcgctgcactcgtctagcgtgtcctggtcgatgtcgagattgtcgaggctgatttctttaacagtaaggttcacgttgtcgagggagatgggtacactgtactggttttcgacaccgccaacaatgttttctagctgttgcatgttggtgggctgttgttggatgattcggtgtaccgctgttttgagggcagtgtaggggatattggttatgttgttcatggttttatcccatccctgtgctgtcgtcgctatcgtctggatagtatctactgtttgcgtagcctgtgagggtgatgagtgtttggtctgcccactgtttcacggtttgtcttgtcaccccgagccgttgggctgccaccgaataggtttgatcatacccgtatacttcacggaatgctgccaaccgtgccaaatgttttcgctgtttggatggctggcaggtgagggtgtagtcgtcgatggctagctgcaaatcgatcatggtgacaatgttgttgccgtggtgttgtggcgcggttggtggtggtggcattcctggctcgactgatggtttccatgggccgccgttccagatccattgggcggcttggatgatgtcggcggtggtgtaggttcggttcatgtgtcatcccctgaataggttgtcgaggttgtctgggttgctggtgttggtggtgtcgaatcgtccgacgcagtggcagtagtcgtacatgagtttgataatgtgttggtggtcgccgaggtaggtgtttccgctgatactgtaggtggctgtgccgtctttactgatggtgtatttggcggtgatggtttcgggtgtttgggtgttggtgatgatggcggtggtggtggcgcctactgtttggagtatggtggtttgggttccgtcgtcgagggtggttgtgaccattttggggttatccttttagttgctggtttgtgtgtcggctagatgaatgatatcggataaaggtttcggttggtctaggtgttgtatggttttgttggctagccgtttggctaccctgtagcatattttgatgtagtgtttgttgtctaggttgtggtattgttcccgcaccgcaatatatagtagggagtcttggtacaggtcgtctgcactgattgcggggtagtgtgtggctactttggtgcatgcccggttgagtgtgcgaagatgatggtttgtggcccatacccacgatgcggtggtggccaggtctgcttttgttggtcgtctgctcatggcactatctcatctcgctatctggtagttgtttggtgttttgttgtggatagtgtagcacactagtccggggtggccggtggtgcctgtgcggtgccgaaaccatgtggattcgccttccatggatgggcattggatgaaggtgcgttgtccttgctcggagatttctaggtggtgccggtgccctgccatgaggatgtgggatgtggtgccgttgtggaattcttggccgcgccaccattcgtactgtttgccggttttccattggtgcccgtgggcgtgcaggatttgtgtgccggccacatcaacggtggtggtcatttcgtcccggctggggaagtggaagtgaaggttgggatattggttgttgagctggtaggcttctgcgatggcccggcagcagtccacatcgaaggagtcgtcgtaggtggtgacgcctttaccgaagcgcacggcttcaccgtggttgccggggatggatgtgatggtgacgttggcgcagtggtcgaacatgtggatgagttgcatcatggccatgcgggtgagcctgatttgttccgtcaggggtgtttgggtgcgccaggcgttgttgcctccttgtgacacgtatccttcgatcatgtcgccgaggaatgcgatgtggactcgttgcggtttgcctgcctgttgccagtagtgtttggcgactatgagggagtgtaaatagtcgtcggcgaagtgtgctgtttctccgccggggatgcctttgccgatttggaagtctcccgccccgatgacgaaggccgcattgctatagtcggtgtgggtgtcctgttcgggttttggtggctgccagtcggctagtttatcgacgagttcgtccacgggatacgggtttgttgcgggttggtggtcgatgattttttgtacggatcggcctgtttctccgttggggagtgtccattcggagatgcgtgtgcggcgtacagtaccattggctagattgtcgtcgatggtgtcgatggcgttgtcgtggttggctagctgtgtgagtagccggtcaatattgtctatcactggttttcctcctcttgcggggtggtgttggcttgtttacggcgatagtcttttataacggtggcggagatggggtatcctgcctgggtgagctgttttgctagccacgaggcggggatggttttgtcggcgagcacgtcggcagctttgttgccgtagcgttgaataagggtttcagttttggttgccatgatgtcctatcggttgtgtggtgggctgccatcctgtgcgacagtcgccgtcgtgtcctggtttgcgggtgcaccacgatacggttccgtctgtgtggttgagtgttttaccgcacatgacgttttgtagatgctccggcagctcgctattgctatcgtcttgctcgtctagcaaagttttttgttgggtgaaaaactcggacacggtgccgttgtggactgggagtatccatgttttccattgttgttgtagccgggtgttccagtggaattgttttgctgcgttcgtggcttgtttgatggttttgaaatagcctacaatgatccgttgatggtcactatcgggcttgtgtggccctttccaatattgggcagctacagcgtatttgatgttgtctgtgaagcgcccccagcagtattccaccatgtgtgatagtaccttgtcgggcatgtctcgtacttggttttcgtcgagccactcgtcgacaataatgttgcgtatggctcgcttgtctttggtggtgggcttgaatgctatgctcacaatgctggcctgtcgtcttgcatgaaatcattaaaggatgattcgcttgtgcggcgtgcttgcgtgatttgctggtcagtccagtcggggtgttgctgtttcaaatagtaccagcggcacgcattgtaggtttcgtcttggagccgtgtgagattgttttcggtgatgatttgtttccacattgtccatgacacgtcgagccggttgaggatttcgagggctgggatgttgaattggtcgaggaagaggatttcgtgggtgtagtagtttttctcgtattggtcccatccgcttcggtgcctgttgggctggtttttggggtaggcttcccggcagattttgtgtaaccgtttggccatgtcgtcgggtagtttaatgtcggggttggcgcggatcatggatcgcatcccatcataggtggtgccccaggtgtgcatgatgtaggtggggtcttcgccatcagcccatttttctgcacagatggcgaggcggatgcgcctcctggctgtttggctggtgttgcgccggttggggattgggcacgtgtcgaggggatccatgatgttttagtgtacctttctggtttcgtgttgttgacgtgttttactgtagcacagtgtctagtgcttgtgtcaaccctgtttttccggcctgaaggtaggtgtctgtgacatcccccagggtgaggggcacatgggtggcttgggggagtgctgcctggagggtttgcgccatcttgtctcccgcggggtctgggtcggaccatatgtagatgtggtcgtagccttcgaagaatttggtccaaaagttttgccacgaggttgcgccgggtagggctacggccgaccatccgcattgttcgaggatcatggagtcgaattcgccttcgcaaatgtgcatttcggctgccgggttggccatggcggccatgttgtagatggagcctgtgtctcctgccggggttaggtatttggggtggttgtgggttttgcagtcgtgcgggagtgagcagcggaaacgcatttttcttatttcggctggctgcccccaaacggggtacatgtaggggatggtgatgcactggttgtagtcttcatgacctggtatgggatcattgtcgatgtatccaaggtggtggtagcgggctgtttcttcgctgacgcctcgcgctgagagcaggtcgagtatgttttcgaggtgggtttcgtagagggctgaggctttctggattcggcggcgttccgcaatgttgtatgggcgtagtgtgtcgtacattcgggttttcttcttctaatcgttgttgtagcttggcgagtccgcctccgacaccgcatgtgtggcagtaccagacgcccttgtcgaggttgatgctcatggagggctggtggtcgtcgtggaacgggcagaggatgtgttgctcgtttcgtgacggattgtagcgtatccggtagatgtcgaggaggcggcaggtgtcagaggtgtgggaggagctcgttgagggttgataccacataggcttcgctccatggcttgttgcgctgtttcatcactacgagtccgatggtggaattgttttgtttgtttcggtgtgtttcgtagttgcgtgcctcccggctggcttgtttcacgaattgggctaggtgtggttgcccggctttcgcctcgatcacataggttttgttgccggttgtgaggatcaggtctccctcgtcttcgcggccgttcagatggaggcgctcgatatcgtgtccggtgtcgcgtagctggtgcaataatcgtgtttcccattcggctccggcccggcggttgcgtgcctgttgtgtcgccatcatagtcctttgtgtgttttggtcatgttccatggctgtttttcggcgagtggcccgaagaatgtgtattctgggtaggctcgtagccgctcgtatcgggtgccgtctgggctggatcgcccggtgcgctgtttcaacactgcgatgcgtgcctctgccgggatcgatagcccgttgccgttatcctcgccaccatacaatgagactccgaggatgagttgtggtttttcggagaggccgtttttgatttccctgcgtgccggggggtgttcgatgtcggagccggttttgtcggtggcgtggtgggtgacaataatggtggagcccgtatctctacccaatgctgtgatccattgcatggcttcttgctgggcctggtagtcactctcgcagtcttggatgtccatcaggttgtcgataacaatgagtggtgggaaggtgttccacatttccatgtaggcttgcagttccatggtgatgtctgtccaggtgatgggtgactggaatgagaatgtgatgtgttggccgtggtggatgctgtctcgatagtattctggcccatagtcgtcgatgttgtgttgtatctgtgtggtggtgtgttgggtgttgagtgagatgattcgtgtggaggcctcccagggtgtcatgtcccctgatatgtagagggcgggctggttgagcatcgctgtgatgaacatggctagccctgatttttggctgccggagcgccccgcgatcatgactaggtcccctttgtggatgtgcatgtccaggttgcggtagaggggttctagctggggtatgcggggcagctcggctgcggtttgggaggctctctcgaaggatcgttggagagagagcatcggagcctttatctatctgtctatcggttggatgttgttttggtggtcagatggagtcgatatcgatgtcagcatcagcaggggctgtggtgtcgtctagctggccgttatcgcgcttgtctacgtattcggcaaccttatcgtagatggcgtcgtctaatggtttgagcacgaccgcgttgaacccgtttttggtgcgtacggtggcgagtttgaaggcctgctcctcgccaaggtaggtttctagatcgcggatcatggagtgtggacggtcgttgttgccgcgtgctttctcaatgatagcgttggggatggtttctggggtgccgttattgagatcctcgagggtgtggaagatggtgacatcagcgtagatgcggtctgcgacctgtccaccgtagccttcggtgttgtgttctacgtcgcggactttgaaggcgatggcggtggcgtcctggtttcgggacgggttgaagaaggtgctgttgctgttgttgcggtagttggcaagtcccattattgtatcctttactgttgtgtctgttattgttggtttctgttggttatcgggtgaggctgtttcgtttgctgcggaaagcctcggaaacgtcactgttactggtgatgatctttttgtactgttttagaaggtcggctagctgtgtcttgcttgttgcattgttgattttgttgatgacgatggtgttttctttggatgcgatgttgtccacgtagtctttggcggcctggttgtatcggtcttggaggatgatggatgcgctcgctacgagtgttgctagatcccagtctttggacacgtcatcgtttttgagtccgcccaataaatcgatgatggcctgttttgtctgctctgctgtgtctcctcggatgaccgcccatggtgcagcatagtctccaccatatttgagtgtgatcgtgagtcgatcattgtcgatcttgtctttatcggtcatttggtgtccttttctttattgtctgtttggggtggctgtacggtggattctaccgggtacctgtaggcgtctttgccgtctacagcccagcaggcgtccttgacagggcatcctttgcagagtgtggtgacgtgtgggacgaagatgccttcgctgattcctttcattgcttgactgtacatggatgatacatgccggtaggtgttgttgtcaaggtcgtagagttcggtggatgtgccttgtgtcggggacttgtcgtcgttgcggctggtggctggcgtccaaaacatgcctttcgtgacattgatgccgtgttgggcgagcatgtaccggtaggtgtgcagctgcatactgtcggcgggtaggcgtccggttttgaggtcgaggatgaatgtttcgccggtgtcggtgtcggtgaaaacgcggtcgatgtagccgactatttttgtgtcatcgtcgaggatggtttctaccgggtattcgatgcctggtttaccgtccaggattgcggtgatgtattctgggtggttgcgcctccatgttttccagcggtccacaaaggtggggccgtaaaccatccaccagtcgtagtctttcttgtgtggcccgcccgactcgcacatgtttttgcatattcttccggagggtttgatttctgtgccttcggattcggcgagggcgacttgggtgtcgaaaatgtttttgaaggatgcgagtttgtctggtagtgcagggtattcggcgggattgtacaggtgtagatcgtattgttcggtgatgtggtgtatggcgcttccggcgatggtggcgtaccaggtgtgataggtggctttgtatccgtgttggaggcgccatttttctccgcattcggcccactgggtgagtgaactgtaggagatgtggcctggatggtggatggttttcgggtattgtgctagaggcattatttgtcgcttttgttccatgggttgcgggtgtcttggccggcgtggtgttgctggtatgcgaggagtgcgaggcagtgccaggcggcgtgggccagatgcgacaaatgtgattcctggtcgaggttgtttccttgctgccatgatagtaggtggcggtagagggcgtcgacactgtggctccacgggtatcctccggtccagttgttgtcgccgtatttggtggcaccgtagcctgctacttcgccgagagcgtgaagggatgcggggtcgatgagggagagcctgcagagtttcaattcttttcgggcaccggtgttggggtcggtgtacatgcgggtgggctcatccatgagatgtgtgctccttaagggtgggttactggttgttgttgtgggcgagtgctactgcgagaataatgatggcgagggtttcagcgatcagtatgggtgttgtgatcatttgctgtctttgggcttgtatgtgagtgttgatgcacccaggagggtggcgagggcgcatgcggcaataatggcgagggctgccttgtgtggggtgccggttgcgtacatccatgtgatgatgccgccttggatccaggcgaggctggtgaagaacgtttcgtagctgtgtagctcaatgttgttgttgggtgtgttcatgcttgctcctgaagaatggtgttgatggttttataaatgttgtacaggtcggtttcgatagataacagttggttgatttggtggtcgaggttgatgtctgggttgagggtgttgatgcgggatgcgatgtcggtggctgtgcgtagtgtgccgccggtgtggtgaataatgtgtgccgtgtcggcgagtccggtagtgacagcgtagtgggagaggagaggcatagcggtgatgctccttggcgggttactgttgcgggttgatgttgaggtcggtgacgtgctggtggtcttctgttccggtgacgaggcagtggacggtgacgggtagtttggatgcgccgggctgtttcgcggttgcgccgtagacgatgctgaatgtgtctttaccgatggttttgtggagttggaggtcgatgtcggggttgccgttccagttgacaccttgtgcggctgcctgttgttcggctttgtggttgcaggtgtgtgctgccgtgatcatggtgagtccggtggcggtttcttcaccccttgcttgggcttgcttgtgggctttctgctgttcggcttgtagggagcgggtggcggcggcctggcgggccttcttctcggctttgcgctgttgggtagtcttgggggtccattcggtgttggctgtggtggcctgtggggctggctgtgaggcgaggggcggattgtcgtctggggctggcatgaatgaggcggcggcaatgatggcggctgtgatgccggcgatggtgtagccgtttttcttgttcatgttttgcttcccctttccggggtgttgttcgttgctgacatgatcaatgatggtgtgggcggtggcccatgtcaagggtgcgctcaacgattgtgagcgatgcttgcgtggctaggtgttttatcgggcacacagggtgagtaggtggccaacattgatgcgggtcacgttccaatagagttgcgtggcttcaccgccggtgagcggcttccactcatcatggctgaacacggtgccgtcggtggctatgaatgtgttggggcgtagcttgtggagttcggcttccacatgctgccggtaggcttcggcaaggccctcaaaatcgaggtgttcgcaggagaggttttcgaggcgtgtcaggtcgaaaggtacggggcagtcgtagctggctggggtgtaaagctgggtgaaatggttggcgatcttctgcataataggtttcctttcgtgtgatgtgttggtggttttatcgggttactgcggcgatgatggcgtcgaggtcgatcgtgtcgatcatgtcgtggagttcctcactctcgccctcggtgagtgactgccagttgcgtggcccatacactgcaccgtcgagagtgacagtccagtctggccggatgagtcgtatggcttcttgtactttagcatggtacatgcggcgcaccatatcgagatcgatgtcgtctgaatggtttccggtgaggctgtggaggctgagcgggtcgatttctgtctgcctgtagagggatgtgaaggatggggtgatgagtgtgtcatccattggtgtgctcctttccggggatgctgatgtatgggttgttgtggtttctagagtgtgtaggttgcgaccccacagtcaaggctgcgctcaatcggattgagcgtttcatgctggagtgtggggtgtgacagatgtcacttaagcctttattgcctctctcggcgtctcaaatcttctaggggtaggattatgcagggttgaccctgctgatcgattctagggcccttctagggcgtctcaggggtatgtctgggtgatagcgggtgtgacagatgatccagcgagtcaaggtgccgagcttagacataagatctatcatctaggtgtgtgagatgtatcacatcctcctggcttggtgtgtactctcaagactactctgccgatctggcgtggagggtgtagcccagaaatgccgtttaaagccttcacacggcgcctaggagcgccttgcagggtgggggctaggtatttatacccccagcatattctgatcgattctagatgcctccaggagcatgatacacgatcagccatcaagacgcagctcatcagcccctatcctgcttagctaagcctacactatgtggacagtgtggaatgctaagagggaagaaggacgcggtaaaagaaagaaggggagcatcagccttcacacctgaggcacttaagttaaccttagggtcttagcactgagcatttagcaccgagcccctcaagggctcggcatcagcccgagcaggctcagccctgaaaggagtacacgccatcagggaaggcttgagagtatgaggagcctcagcgacgagtactcgaaagcctgagggaagaccatcagcactgatgggcctagcgtgttcggaaaagacacaggagtacagtatgacaactgtccgggagtgaaaccccttccggctagggcaaacacccgtcctagactagcccacacccttagctgttaaccttccgttcattaaacgttaaggaaacttttaggtttgatttttggacctttaccaccaaaaacacccttttacacccctcaaacccgcctatagagccaaatccgccagtttgactcatcccaggtggcatatgataggctggacaggtagccagctggacgcaaggccggaaagtgctgacgcacttcccaacctcgcttaccatcagtctaccaaagacttaaagacctaagggcttagcgctaaggtgctgatagcttagcaccgagcccctcaagggctcggcatcagtcttaggtacttaaagtaactttaaagacttaaagtaaatatataaccttagcagttaaacgtttaaagctttaaaccttaacacctaagttaagtataaaaccttaaaggcttagcacttaaggatataaacttaaagagttagaataaccataaagatttaaacacttaaagtaactataggactttaaaaaccttaagtacctaaagttaaccatcagtcttaaactttaatgttataacctataagtcttaaagcttataggtataataatataatataattatataagtattaaagcttataagttataaaagttttagaagagctaagaggttaaattctttacttctctactctctttggttctttctctcttctcttcttttcttcatcaggggagaagaggaacctttaccatcagcgctgatggtcttttcgccgtgtgtctcgtgtgcttggtcgcaagctcccggttacacactccccacactctctttcacctgtgtccctttaaggcttggcgtgttcggctgaaggcgtacggcgtgtcacgggaacacccttaacaccaggtaagacttaaagtgtatattatatgtagaagactttaaaaactttgagagtgtacccttcttggctgtgttctacaccgctaggcgccaagcgctaagccttgaaacgcgaacacacacccacccccatttttcttccgcgtccttcttcttttgacacagctggggggcgatgtgatctttctcacacccatgggggtagtggagaaaacaaacaccccggaacgttcaagacgccccctcaaacgcacaaaacagggcctagaatcgatcagcagggcaagggcaaggtattcatacccccaacggtttccaggccgttacagaggcaaacaagacccgtacagggctagccgaggatcggagacgtgatggcacacaccaaccgcaccgcatcctccgcccaccgccgatggcgagcacgactcatcacccaagcccgcaaacaaggacaaaccacctgcccactctgcggaaccgagatcgcctgggacacccacgacctaccaaccagccccgaagccgaccacatcacacccgtcagcaggggaggactcaacaccctcgacaacgggcaaatcatctgcagaacatgcaacagaagcaaaggcaatcgcagcgaaccaaacatcaaattccaacaacaaaccacaaaaacattgattccatggtgaaaaacccgccaacccccaccgggcacaccccctgcacacccgtgcaagacc

SEQ ID NO: 42 - DNA, 29377 bp, unidentified
  source 1..29377: mol_type = unassigned DNA; note = Bacteriophage of P. acnes
agtgaaatacctcccttttgtggttttgtctgtttgtcgactttttgtgttggtggtgagtgttgtgcagcctgagcttcctgatagtcgtgagtggtgtggggagacgcgtcgttggtggcgtgtgtggggtgaggatagccgcgcatcgtacgtgtctgatgaggagtggctgtttctcatggatgctgcggtgattcatgatgtggtgtggcgtgagggtcgcgcggatttggtggcttcgcttcgtgctcatgtgaaggcttttatgggtatgttggatcggtattcggttgatgtggtgtctggtggccgtggtgggggttctgcggtggcgatgattgaccggtataggaagcgtaggggggcctgagtaggtgtctggtgttgttgggtctcaggttcctcgtcatcgggttgctgcggcgtattcggtgtctgctggcggtgatgctggtgagcttggtcgtgcgtatgggttgacgcctgatccgtggcagcagcaggtgttggatgattggcttgctgtgggtggtaatggcaggcttgcttcgggtgtgtgtggggtgtttgtgcctcgccagaatggcaagaatgctattttggagattgtggagttgtttaaggcgactattcagggtcgccgtattttgcatacggctcacgagttgaagtcggctcgtaaggcgtttatgcggttgaggtcgttttttgagaatgagcggcagtttcctgacttgtatcgtatggtgaagtcgattcgtgcgacgaatggtcaggaggctattgtgttgcatcatccggattgtgccacgtttgagcgtaagtgtggttgtccgggttggggttcggtggagtttgtggcccgttctcggggttctgctcgcgggtttacggttgatgatttggtgtgtgatgaggctcaggagttgtcggatgagcagttggaggctttgcttcctaccgtgagcgctgccccgtctggtgatcctcagcagatttttttgggtacgccgccggggcctttggctgacgggtctgtggtgttgcgtcttcgtgggcaggctttgtcgggtggtaagaggattgcgtggacggagttttcgattcctgacgagtctgatccggatgatgtgtcgcggcagtggcggaagcttgctggtgacactaatccggcgttgggtcgtcgtctgaatttcgggacggtgagcgatgagcatgagtcgatgtctgctgccgggtttgctcgggagcggcttggctggtgggatcgtggccagtctgcttcgtctgtgattccggcggataagtgggtccagtcggctgtgggtgaggcgagccttgttggcgggaaggtttttggggtttcgttttctcgctcgggtgatcgtgtcgcgttggcgggtgctggtaaaacggattctggtgtgcatgttgaggtgattgatggcctgtcgggcacgattgttgatggtgtgggccagctggctgattggttggcgttgcgttggggtgacactgaaaaggttatggttgccgggtctggtgcggtgttgttgcagaaggcgttgacggatcgtggtattccgggccgtggcgtggtggttgctgatactggggtgtatgtggaggcgtgtcaagcctttctggaaggtgtaaggtcgggtgtgatcagtcatcctcgtgccgattcgaggcgtgacatgttggatattgctgtgaggtcggctgtgcagaagaggaaaggttctgcgtggggttggggttcctcgtttaaggatggttctgaggttcctttggaggctgtgtctttggcgtatcttggtgcgaagatggcgaaagcgaagcggcgtgaacggtctggtaggaagcgggtgtctgtggtatgaactcggatgagttggctctgattgagggcatgtacgatcgtattcaaaggttgtcttcgtggcattgtcgcattgagggctactatgagggctctaatcgggtgcgtgatttgggggttgctattcctccggagttgcagcgtgtgcagactgtggtgtcgtggcctggtatagctgtggatgctttggaggagcgtctggattggcttggctggactaatggtgacggctacggtctggatggtgtgtatgctgcgaatcgtctatcaaccgcgtcatgcgacgtccaccttgatgcactaatttttgggttgtcgtttgttgcgatcattcctcatggtgatggttcggtgtcggttcgtccgcagtcaccaaagaattgtacgggcaagttttcggctgacgggtctcgtttggatgctggccttgtggtgcagcagacgtgtgatcctgaggttgttgaggctgagcttttgcttcctgatgtgattgttcagatggagcggcggggttcgcgtgagtgggtggagacgggccgtatcgtgaatgtgttgggtgcggttccgttggtgcctgttgtgaatcgtcgccgtacttctaggattgatggccgttcggagattacgaggtctattagggcttacactgatgaggctgttcgcacactgttggggcagtctgtgaatcgtgatttttatgcgtatcctcagcgttgggtgactggcgtgagcgcggatgagttttcgcagccgggctgggtcctgtcgatggcttctgtgtgggctgtggataaggatgatgatggtgacactccgaatgtggggtcgtttcctgtcaattcgcctacaccgtattcggatcagatgagactgttggcgcagttgactgcgggtgaggctgcggttccggaacgctatttcgggtttatcacgtctaacccgcctagtggggaggctttggctgccgaggagtctcggcttgtgaagcgtgctgaacgcaggcagacgtcgtttggtcagggctggttgtcggttggtttcctggctgcgagggcgcttgattcgagtgttgatgaggccgcgttttttggtgatgtgggtttgcgttggcgtgatgcttcaacgcctactcgggcggctacggctgatgctgtgacgaagcttgtgggtgccggtattttgcctgcggattctcgtacggtgttggagatgttggggcttgatgatgtgcaggttgaggctgtgatgcgtcatcgtgccgagtctgcggatccgttggcggcactggctggggctatttcccggcagacgaacgaggtttgatgaatggcttcgggtgctatgtcgaggcttgccgcgactgagtatcagcgtgaggcggtcaggtttgccgggaaatacgctgggtattatgccgagcttggtcgtttgtggcattccgggaagatgacagatgcgcagtatgtgcgtttgtgtgtggagttggagcgtgccggccatgatggttcggcgtcgttggctgccaagttcgtgcaagattttcgccggttgaatggtgtggatcctggtttgattgtgtatgacgagtttgatgctgcggcggctttggctaggtcgttttcgactatgaagattcttgagagcgacccggatagggcgaatgacacgattgatgcgatggcggcgggttttgatcgggctgtcatgaatgctggccgtgacacggttgagtggtcggcgggtgcgcagggtaggtcgtggcgcagggtgactgatggtgatccgtgcgcgttttgtgccatgttggctacgaggtcggattatacgaccaaagaaagggcactcactactggacatactcggcgtcataagcgtggtggtaagcgcccgtttggttcgaagtatcatgatcattgtgggtgtacggtggttgaggttgttggcccttgggaaccaaatagggctgatgccgcatatcagaggacgtatgagaaggctcgtgagtgggttgatgatcatgggttgcagcagtcgcctggcaatattttgaaggctatgcgtactgttggcgacatgagatgatggtttccggttgtgtgccgccggttattggtgcacagggttgtctcccgcacgggggtcaacaatgttgtgttgttttccgcaaggagtgtaaggttgggctatggccgatcagagtgttgaagaacagagtgtcgacaatgatgctgttgagcccggaaagggcgaggacattgttgatgttgtgaaggatgggcaggctgccggcgatgatcatgccggtgatgtttccgtgaaggaggagtcttcttctggcacggattggaaggctgaggcccgtaagtgggagtctcgtgctaaaagtaatttcgccgagttggagaagcttcgcgcctcggatggtgatgcggggtctactattgatgagcttcgccgcaagaatgaggaactcgaagacaggatcaatgggtttgttcttgagggtgtgaagcgcgaggtggctgccgagtgtggcctgtcgggtgatgcgatcgctttcttgtcgggtggcgatcgtgaagcactggtggagtctgctaaggctttgaagggtttgatcgaccatagtagtggtggcgcgggtgtgcgccgtcttgcggggagtgcccccgttgatgatgttaaacgacgtgagggtgtcgcgtttgtggatgctcttgtcaataattctaggagatgatttgtgatggctgacgattttctttctgcagggaagcttgagcttcctggttctatgattggtgcggttcgtgaccgtgctatcgattctggtgttttggcgaagctttcgccggagcagccgactatttttggccctgttaagggtgccgtgtttagtggtgttcctcgcgctaagattgttggtgagggcgaggttaagccttccgcgtctgttgatgtttcggcgtttactgcgcagcctatcaaggttgtgactcagcagcgtgtctcggacgagtttatgtgggctgatgctgattaccgtctgggtgttttgcaggatctgatttccccggctcttggtgcttcgattggtcgcgccgtggatctgattgctttccatggtattgatcctgctactggtaagcctgctgcggctgtcaaggtgtcgctggataagacttcgaagacggttgatgcaaccgattccgctacggctgatcttgttaaggctgtcggcctgattgctggggctggtttgcaggttcctaacggtgttgctttggatccggcgttctcgtttgctctgtctactgaggtgtatccgaaggggtctccgcttgccggtcagcctatgtatcctgccgccgggtttgccggtttggataattggcgtgggctgaatgttggtgcttcttcgactgtttcgggtgccccggagatgtcgcctgcctctggtgttaaggctattgttggtgatttctctcgtgttcattgggggttccagcgtaacttcccgatcgagctgatcgagtatggtgacccggatcagactggccgtgacctgaagggccataatgaggttatggttcgtgccgaggctgtcctgtatgtggctatcgagtcgcttgattcgtttgctgttgtgaaggagaaggctgccccgaagcctaatccgccggccggtaactgattcatttgttgcgataatgtttatgctgtgtgcagggggtggtgttgatgggtatcattttgaagcctgaggatattgagcctttcgccgatattcctgaggggaagcttgaggcgatgatcgccgatgtggaggctgtggctatcagtgtcgccccctgtatcgctaaaccggatttcaaatatagggatgctgctaaggctatcctgcgtagggccctgttgcgctggaatgatactggcgtttcggggcaggtgcagtacgagtctgcgggtcctttcgctcagactacacggtctaatactcccacgaatttgttgtggccttctgagattgccgcgttgaagaagctgtgtgagggtgatggtggggctggtaaagcgttcactattacaccgaccatgaggagtagtgtgaatcattctgaggtgtgttccacggtgtggggtgagggttgctcgtgcgggtcgaatattaacggctacgctggccctttgtgggagatatgatatgaccagttttccttatggtgaaacggttgtgatgcttcagccgactgttcgtgtcgatgatcttggcgacaaggtggaagactggtctaagcctgtcgagactgtgtaccataacgtggccatctatgcctctgtttcgcaggaggatgaggccgccgttcgtgactcggattatgagcattggtcgatgcttttcaagcagcctgttgggggtgccggttatcgttgccggtggcgtattcggggtgtggtgtgggaggctgacgggtctcctatcgtgtggcatcatccgatgtccggttgggatgctggtacgcaggttaatgtgaagcgtaagaagggctgatgggttgtggctcaggatgtgaatgtgaagctgaacttgccgggtattcgtgaggtgttgaagtcttctggggtgcagtctatgttggctgagcgtggcgagcgtgtcaagcgtgcggcctcggcgaatgtgggcggtaatgctttcgataaggcccaataccgtaatggtttgtcgtcggaggtgcaggttcaccgggttgaggctgtggcgaggattggcaccacctataagggtgggaaaaggattgaggcgaagcatggcacgctggctaggtcgattggggctgcgtcgtgatcgtttatggtgatccgcgtgtgtgggctaaacgcgtgctcaaggatgatggctggctgtctgggataccatgcaccgggacagtgccggatagttttgagggtgaccttatttggttggcgttggatggtggcccacagttgcatgttcgtgagcaggtgtttttgcgcgtgaatgtgttttcggatacacctgatcgtgctatgagcctgtcgaggcgtgttgaggctgtccttgcggatggtgtggacggtgaccctgtggtgtactgtaaacggtctactggccctgatttgctggttgatggtgcacgttttgatgtgtattcgctttttgagctgatatgcaggcctgcggagtttgaataagattattgtttttgttttaatgtaattgtttgatatttaatgggggttgtgatggctgcaacacgtaaagcgtctaatgttcgttcagcggttactggcgacgtttatattggtgacgcgcacgcgggtgatactattaagggtgtggaggcggttccttccgagcttacagctttagggtatttgtcggatgatgggtttaagattaagccggagcgtaaaacggatgatttgaaggcttggcagaatgcggatgttgttcgcacggttgctaccgagtcttctatcgagatttctttccagctgatcgagtctaagaaggaggttatcgaactgttttggcagtcgaaggttactgccggagccgattcgggttcgttcgatatttctcctggtgccaccactggcgtgcacgctttgttgatggatattgttgatggtgatcaggttattcgctactatttccctgaggttgagcttatcgatcgtgacgagatcaagggtaagaatggcgaagtgtatgggtatggtgtgacgttgaaggcgtatcctgcccagattaataagactggtaatgcggtgtcgggtcgggggtggatgacggctttaaaagctgatactcctccttctccgaagccggatccgaatccgccgtctgagaactgatacacgattttagggattgttgatagatgagtgacactggttacacgttgaagattggtgaccgtagctgggtgttggcggatgcggaggagacggctcaggctgttcctgcccgcgtgtttcgtcgtgcagctaagattgcccagtcgggggagtctgcggattttgcccaggttgaggtgatgttttctatgttggaggctgccgccccggctgacgctgtggaggctttggaggggcttcctatggttcgtgtggcggaggttttccgtgagtggatggaatacaagcctgacggtaagggtgcctctttgggggaatagtttggctccacggcctgattgatgattatcgtggggccatcgaatatgattggaggacccggttcggttgctcggtttatgatgttggtggcccggtgatgtgttggggtgaggctgtccggctggctggcgtgttgtgtaccgatacgtcgagccagttggcggcacacctgaatggttggcagcgcccgtttgagtggtgcgagtgggctgtgttggacatgttggatcattacaggtctgctaatagtgaggggcagccggagcctgtggcgaggcctacggatgagcgtagggcccggtttacgtctgggcaggtggacgatattttggcgcgtgttcgtgctggtggcggggtgtctcgcgagattaatattatggggtgaatagtgtatgtctggtgagattgcttccgcatatgtgtcgttgtatacgaagatgcctggtttgaaggctgatgttggtaaacagctttctggggtgatgcctgcggagggtcagcgttcgggtagtctttttgctaagggcatgaagctggctttgggtggtgcggcgatgatgggtgccatcaatgttgctaagaagggcctcaagtcgatttatgatgtgactattggtggcggtattgctagggcgatggctattgatgaggctcaggctaagttgactggtttgggtcatacgtcgtctgatacgtcttcgattatgaattcggctattgaggctgtgactggtacgtcgtatgcgttgggtgatgcggcttctactgcggcggcgttgtctgcttcgggtgtgaagtctggcgggcagatgacggatgtgttgaagactgtcgccgatgtgtcttatatttcgggtaagtcgtttcaggatacgggcgctatttttacgtctgtgatggcgcgcggtaagttgcagggcgatgacatgttgcagcttacgatggcgggtgtccctgtcctgtctttgcttgccaggcagacgggtaaaacctcggctgaggtgtcgcagatggtgtcgaaggggcagattgattttgccacgtttgcggctgcgatgaagcttggcatgggtggtgctgcgcaggcgtctggtaagacgtttgagggcgctatgaagaatgttaagggcgccctgggttatcttggtgccacggctatggcgccgtttctgaacggcctgcggcagatttttgttgcgttgaatccggttatcaagtcggtgacggattctgtgaagccgatgtttgctgccgtcgatgctggtattcagcgtatgatgccgtctattttggcgtggattaaccgtatgccgggcatgatcactcgaatgaatgcacagatgcgcgccaaggttgagcagttgaagggcatttttgcgagaatgcatttgcctgttcctaaagtgaatttgggtgccatgtttgcgggtggcacagcagtgtttggtattgttgctgcgggtgttgggaagcttgttgcagggtttgccccgttggcggtgtcgttgaagaatctactgccgtcgtttggtgctttgaagggtgccgctggcgggcttggcggcgtgtttcgcgccttgggtggcccggtcgggattgtgatcggcttgtttgctgccatgtttgcgactaacgcccagttccgtgccgcggtgatgcagcttgtggctgtggttggtcaagccctggggcagattatggccgctgtgcagccgctgttgggtttggttgctgggctggtggcacggttggctcccgtgtttggccagattgttggtttggttgccggtttggctgcccagctggtgcctttgattagtatgcttgttgctcggctggttcctgtgatcacccagattattggtgcggtgacacaggttgctgccatgttgttgcctgcgttgatgccggtgttgcaggctgttgtggctgtgatacggcaggttgttggcgtgatcatgcagttggtgcctgttttgatgcctgttattcagcagattttgggtgctgtcatgtctgttctgccgccgattattggcctgattcggtcgctgataccagtcatcatgtcgattatgcgtgtggtggttcaggttgttgcggttgttatacaggtggtggcccgtattcttgcggttgtggctccgatggtggcggctgtggtagggtttgttgcccgtattgttggtgctgtcgtgtcggctgtggcccgtgttattgccactgttgcccgtgttatcgggtggcttgtggctaattttgtgtctggtttggcacgtatgggttcggttattcaggctggctggaatcgtattaggtcgtttacgtctgcgtttatgggcggtttcaagtcgatcatttctgccggtgtggccgcggttgtcgggttttttgcccggcttggtttgtcggttgcctcccatgtgaggtctggttttaacgcagcccgtggcgctgtttcttccgctatgaacgggatacgtagtgtggtgtcttcggtggcgtctgctgttggcgggtttttcagttcgatggcgtctagggttcgtggtgctgcctcgtccgggtttaatggtgcccggagtgcggcatcgtctgctatgcatgctatgggctcggctgtgtctagtggtgttcatagtgtgctagggttttttcggaatctgcctggcaatattaggggcgccttgggtagtatgggctccttgttggtgtctgctggccgtgatgtggtggccggtttgggtaatggtatccggaatgctatgagtggcctgttggatacggtgcgtaacatgggttctcaggttgctaatgctgctaaatcggtgttgggtattcattccccgtctagggtgtttcgtgaccaggttggccgtcaggttgttgccggtttggctgaggggatcaccgggaatgcgggtttggcgttggatgcgatgtcgggtgttgctggtcggcttccggatgcggttgatgcccggtttggtgtgcgatcgtctgtgggctcgtttacgccttacgaccggtatcagcgtgcgaacgataagagtgttgtggtgaatgtgaatgggcctacttatggggatccgaacgagtttgcgaagcggattgagcggcagcagcgtgacgctttgaacgcgttggcttacgtgtgattgggggtgttgtgtatgtttattcctgacccgtctgatcgtgccggtttgactgttacctggtctatggatccgctgtttggtgtggagcgtgtgcttcatttgacggattatacgggtgcgtctcctgtcatgttgttgaatgattcgttgcgcggtttgggtgttcccgaggtggagcatttttctcaaactcatgttggggtgcacggctcggagtggcgcgggtttaatgtgaagcctcgcgaggtgacgctgccggtgttggtgtcgggtgttgacccggatccggtgggcgggtttcgtgacggttttttgaaggcctatgacgagttgtggtctgcttttccttcgggcgaggagggggagttgtcggtgaagactcctgccggtgttgagcgtgtgttgaagtgtcggtttgattcggtggatgacacgtttacggttgatccggtgaatcgtggctatgcgcgttatctgttgcatttgacggcttatgacccgttttggtatggggatgagcaaaagtttcgttttagtaacgcgaagttgcaggattggttgggtggcggccctgtcggcaagaagggtacagcgtttcctgtggtgttgacgcctggtgttggttcgggttgggataacctgtccaataagggtgatgtgcctgcgtggcctgtgattcgtgttgagggcccgttggagtcgtggtctgtgcagattgatggtttgcgtgtgtcttctgattatcctgtcgaggagtatgattggatcactattgatacggatcctcgccggcagtctgctttgttgaacgggtttgaggatgtgatggatcgtttgacagagtgggagtttgcgcctatcccgcctggcggttctaagagtgtgaatattgagatggttggtttgggtgccattgttgtgtcggtgcagtacaggtttttgagggcttggtgaatagttgatggctggtcttgttccgcagataacattgtttacaccggattatcaccgtgtggcgcctatcaatttttttgagtcgttgaaactgtcgttgaagtggaatggtttgtcgacgctggagttggtggtgtcgggggatcattccaggcttgacgggttgacgaagccgggggcgcggctggttgttgattatggtggcggccagattttttctgggcctgtgcgtagggttcatggtgtgggtccttggcgttcttcccatgtgactatcacatgtgaggatgatattcgcctgttgtggcgtatgttgatgtggcctgtgaattatcgtcccggtttggtgggtatggagtggcgtgccgacagggattatgcccactattcgggtgcggcggagtcggttgctaagcaggtgttgcgggataatgcttggcgttttccgcctggtttgtttatgaacgacgatgagcagcgtggccgctatattaaagattttcaggcccggttccacttgtttgccgataagttgttgccggtgttgtcgtgggctcgtatgactgtcacggtgaaccagtttgagaatgcgaagtttgatcagcgtggtttgctgtttgattgtgtgcctgctgtgacgcgtagccatgtgttgactgccgagtctggttcgattgtgtcgtgggagtatgtgcgtgacgccccgaaggctacttcggtggtggttggtggccgcggcgagggcaaggacaggctgttttgcgaggatgttgattcggcggccgaggatgactggtttgatcgtgtcgaggtgtttaaggatgcccgtaacacggattccgagaaggtgcatctcatcgatgaggctgagcaggtgttgtccgagtcgggggccacgtcggggtttaagattgagttggctgagtcggatgtgttgcggtttgggcctggccgcctgatgccgggtgatttgatctatgtggatgtgggttctggtcctattgcggagattgttcggcagattgatgtggagtgtgtatcgcctggtgatggttggacgaaggtgactccggttgcgggggattatgaggataatccgtcggcgttgttggctcgccgtgtggctggtttggctgcgggtgtgcgggatttgcaaaaattctagaaaagattaggggtttgttgtgggtattgtgtgtaaagggtttgatggtgtgttgaccgagtatgattgggctcaaatgtctggtctgatgggtaatatgccttcggttaaggggccggacgattttcgtgtcggcacaacgatccagggtgccacagtgttgtgtgaggttctgccggggcaggcttgggctcacggggtgatgtgcacgtcgaatggtgttgagacggtgacagggcagctgcctggcccgggtgagactcgatacgactatgttgtcctgtctcgggattgggagcagaacacggccaagttggagattgttcctggggggcgtgcggagcgtgcccgggatgtgttgcgtgcggagcctggcgtgtatcatcagcagctactggcgacgttggtggtgtcgtctaacgggttgcagcagcagctggataggcgtgctatagcggctcgtgtggcgtttggcgagtctgctgcgtgtgatcctacccctgtggagggtgaccgtgtgatggttccttcgggggctgtgtgggctaaccataacggtgagtggctgcagttgtctccgcgtattgagacgggttcgaagtcgatcatgtttggcggatcgagtgtatatgcttacacgatccagtttggtcgccagtttagtagtccgcctgtcgtggtggcgtctatgggcaccgcggcggggggtacgcagcagattgatgtgaaagcctacaatattactacgagtaagtttgatttggcgtttattacgaatgatggttcgaagccgaatggtgcgcctgcggtggctaattggattgctgtcggcgtgtgactgcacgggtgttatggcggatggtgtgatgttggggggctgtggtgtcgtggtttactcctgcactggtggcctctatctgtaccgcgttggccacggttttgggttcggttcaggctgtcacatcccggtctaggaagcgtttacgcaggctgtctgcgcaggtggatgcgatggaagagtatacgtggggtgtgcggcgcgaggtgcgaaggtttaacgccgggcttcctgacgatgtggagccgatgcatcttcctgatttgcccgagtttttgaaagatactgttgatggtggaggtgagtagggttgagggagttggaggaggagaagcggcagcgccgcaattttgagaaggcttcactggtgttgttgtttttgtcgcttgtgctattggcggtggttgctgcgggtgctttgcgtttcggatcggtgtcttctgagcgggattcggagcaggctaaagcccagtctaatggttcggctgctaagggtttggctgcccgtgtgaggcaggtgtgtgcttctggcgggcaggagtctgtgcggcttcaccagtctggcttgtgtgtggatgctcagcgtgttgagcggagtgtgcagggtgtgccgggtccggctggtgtgcgtggcccgcaggggccgcaggggccgcaggggccggctggtgttgatggttctgctgggctggttggccctgttggtcctcagggttcccctggtttgaatggtgtgaagggtcctgacggtttgcctggcgcgaatggatcagatggccatgatggtgttccgggccgtgcaggcgtggacggtgtgaatggagttgatggcgctgatggtcgggatggtgttaatggttcggccggtgagcgcggtgatgtgggcccttcaggtcctgccggcccgcaaggtgcacagggtgaacgtggtgagcgcggccccgccggtgcgaacggatccgatggtaaagacggtaaggatgggcgctcggtggtgtccgtgtactgttctgagggccgcctgtttgtgaaatatagtgatggtgtggcttctactatatcgggttcggttgcctgccagaaggtgaaaccgtctcctgtggttaccgtgtcatcccacaaataaaagatagaaaaggagtgacttatgtcgatggtgtttgggggtggtgtgtggtgagatacattcctgcggcgcatcactcggccggttctaatagtccggtgaaccgggttgtgattcatgcgacatgcccggatgtggggtttccgtccgcttcccgtaaagggcgggcggtgtctacagcaaactattttgcttccccatcgtctggtggttcggcgcattacgtgtgtgatattggggagacggtgcagtgcctgtccgagtctacgattggttggcatgccccgccgaatccgcatagtttgggtatagagatttgcgcggatggcggctcgcacgcctcattccgtgttccagggcatgcttacactcgtgagcagtggcttgaccctcgggtgtggcccgcggtagagaaggctgccatcctgtgtagacgtttgtgtgacaagcatggtgttccgaaaaggaaactgtctgtggccgatttgaaggccggtaaacgtggtgtttgcgggcatgtggatgtgacggatgcgtggcatcagtcggatcatgacgatccggggccgtggtttccgtgggacaggtttatggccgtcgtcaacggcggcagtggagatagtggggagttaacggtggctgatgtgaaagccttgcatgatcagattaaacaattgtctgctcagcttactggttcggtgaataagctgcatcatgatgttggtgtggttcaggttcagaatggtgatttgggtaagcgtgttgatgccctgtcgtgggtgaagaatccggtgacggggaagctgtggcgcaccaaggatgccctgtggagtgtctggtattacgtgttggagtgtcgtagccgtattgacaggctggagtctgctgtcaacgatttaaagaagtgatgtgttgtgggtaaacagttttggttgggtttgtttgagcgtgccctgaaaacttttattcaaacgtttgttgctgtgcttggggtgactgcgggtgtgacttatactgcggagtcgtttcgtggtttgccgtgggagtctgccctgattacggccggggttgctgcggtgttgtcggtggctacctcgtttggtaatccgtcgtttgttgccggtaaaccgaaaacgacgcctgttgtggatgctgggcttgttccaccggatgatcctggaatagtggagtctcacatggttgacgaaacggatcctggcatgatagagcctatcgacgatgccgatgctggaggctatgtgccgaggcgtgctgctgagtcggaagttggcacggtagagtctactgttgcataagtgaatatatgtgtgtgccccagcggtgctgccacgatcgtgtggtggttgctgctggggcactatttttgtgtctataggggttttacaggttgtcgtctagggtgtcttcgagtgtctgttgtaggagtgcacactcggcgagggtgtcttcagcctggtcgacaatgttttgttttgctatgcctggatagttgtcgcggtgattgtagatggcttccagaatgttgtctgccatgatttgtagtgttagggcctggttggtgatgcattccagctcgtctagggcggcctggctagcctccggctgccggttgtccggatgttctgcaaggttgcagtcccacaggatttcttggcatgcatccctggtgtctgcgtccacatcgatgtcgtctaggctgacaccgttggcgttgaggctgatgttgtcgaggttgatgggaaccagatattcgctgctgatgctgcaggtgatgtttgcgagttctgtcatgtttcgtggctgctgctgtatgatgcggcgggccgcggttttgagggctgtgactgttcggtgtctgttactgggcatcgtttctattcttcttccccggtgtagctggtggtgttggtgtactgggtgagtgtgatcaggcactggtcggcccactgtttcaccgtctgccgtgtcacacccaatcgttgggctgccaccgaataggtttgatcatacccgtagacttccctgaatgcggcaagccgtgctagccgtttccgctgtttggatggttcacaggcgagggtgtagtcgtcgatggccagttgtagatcgatcatggtgacaatgttgttgccgtggtgttgtggcgcggttggtgggggtggcattcctggctccacggagggtttccatggtccgccgttccagatccattgtgcggcttgaatgatgtcggcggtggtgtaggttcggttcactggtcatcccctgaacatgttgtcgaggttgtctgggttgctggtgtcgaatcgtccgacgcagtggcagtagtcgtacatgagtttaataatgtgttggtggtctcccaaataggtgtttccgctgatgctgtaggtggctgtgccgtctttcgcgatggtgtatttggcggtgatggtttcggggttttcggtgtcggtgatgatggctgtggtggtggtgcctactgtttggagtatggtggtttgggttccgtcgtcgatggtggttttaaccatggtgtgttttttccctttcagttgcttgtttggttgtcggctagatgaatgatgtcgggtaagggtttcggctggtcgaggtgttgtatggttttgttggctagccgtttggctaccctgtaacacattttggtgtagtgtttgttgtctaggttgtggtattgttcccgcaccgcaatatatagtagggagtcttggtacaggtcgtctgcactgattgcggggtagtgtgcggctgttttggtgcatgcccggttgagtgtgcgtagatgatggtctgtggcccacacccacgatgcggtggtggccaggtctgcttttgttggtcgtctgctcatggcatctctttcatcgggctatctggtagttgtttggtgttttgttgttgatagtgtagcacacgagtccggggtttccggtggtgcccgtcttgtgccgataccatgtggattcgccttccatggatgggcattggatgaaggttcgtgtgccttgctctgagatttcgaggtggtgccggtggcctgccatgagaatattagatacggtgccgttgtggaattcctgtccgcgccaccattcgtagtgttggttgttgcgccattggtgtccgtgggcgtggaggatccgtgtgccggctacttcgactgtggtggtcatttcgtcccggctggggaagtggaagtgtaggttggggtattggttggtgagttggtaggcttctgcgatggcgcggcagcagtccacgtcgaaggagtcgtcgtaggtggtgactcctttaccgaagcgcacggcttctccgtggttgccggggatggatgtgacggtgacatcagcgcagtggtcgaacatgtgtatgagttgcatcatggccatgcgggtgagcctgatttgttccgtcaagggtgtttgtgtgcgccaggcgttgttgccgccttgtgacacgtatccttcgatcatgtcgccgaggaaggcgatgtggactcgttgcggtttgcctgcctgttgccagtagtgtttggcggctgccagggagtgtaggtagtcgtcggcgaagtgtgctgtttctcctccggggatgcctttgccgatttggaagtctcctgcccctatgacgaaggctgcggtgctgtagtcggtgcgggtgtcctgttcgggttttgggggtgtccattcggctaatttatcgacgagttcgtctacagggtaggggtttgttgcgggttggtggtcgattattttttgtacggatcggcctgtttctccgttcggtaaggtccattcggagatgcgtgtgcggcgtacggtgccgttggctagattgtcgtcgatggtgtcgatggcgttgtcgtggttggctagctgtgtgagtagccggtctatgttgtctatcaccggttttcctcttcctcgtgtgtggtggtggcttgtttgcggcggtagtctttaataacggtggcggagatggggtatccggcttgggtgagttgttttgctagccatgaggcggggatagacctgtcggcgagcacgtctgcggctttgcggccgtatcgttggatcaacgtttcagttttggttgccatggtgtcctatcggttgtgtggtgggctgccatcctgtgcggcagtcgccgtcatgtcccggtttgcgtgtgcaccacgtgatggttccgtctgtgtggttgagtgttttgccgcacatgacgttttggagatgctctggcagctggtcggtgttgttattgtcttgctcgtcgagcagggttttttggttggtgaaatgctcggacacggtgccgttgtggactgggagtatccatgttttccattgttgttgcatccgggtgttccagtggaattgtttggccgcgttttctgcttgttttaaggttttgtagtagcctacaatgattcgctggtggttgttgtctggctggtgtggccctcgccagtattgtgccgctacagcgtacctgttgttgtctgtgaaggcgtcccagcagtactcgatgatgtgttgcagcacattatcgggaatgtcttgtgcttggttttcgtcgagccactcgtcgacaatgatgttgtgtatggcgcgtttgtctttggtggtgggtttgaacgagatgctcacagtacgggcctgtcgtcttgcatgaaatcattgaaggatgattcgcttgcgcgtctggcttgtgtgatttgctggtcggtccagtcggggtgttgctgtttcagatagtgccagcggcaggcatcatatgtttcgttctgcaagcgggtgagatggttttcggtgatgatttgtttccacattgtccacgagacgtcgagcctgcggagcatgtccatggccggcacattaaacgagtcaaggaagagtatttcgtgggtgtagtagtttttctcgtaggcgtcccatccgcttcggtgtctgttgggctggtttttggggtaggcttcccggcatactttgtgtaaacgtttggccatgtcgtcgggtagtttaatgtcggggttggcgcggatcatggatcgcatcccgtcgtaggtggtgccccaggtgtgcatgatgtgtagtgggctgtctccatcagcccatttttctgcacagatggcgaggcggatgcgcctccgggcggctttgctggtgttgcgccggctggggattgggcacgtgtcgaggggatccatggtgttttagtgtacctttctggtttagtgttgttgacaggttttactgtagcacagtgtctagtgcttgtgtcaaccctgttttgccggcctgaaggtaggtgtctgtgacatccccgacagtgaggggcgcatgggtggcttgggggagtgccgcctggatggtttgtgccatctgttcgcctgccgggtctgggtcggaccagatgtagatgtggtcgtagccttcaaaaaatttggtccaaaaggtttgccacgaggtggctcctggtagtgctacagctggccatccgcattgttcgaggatcatggagtcgaattcgccttcgcaaatgtgcatgtcggtttgcgggttggccatggcggccatgttgtagatggagcctgtgtccccggccggggtcaaatatttggggtggttgtgggttttgcagtcgtgcgggagtgagcagcggaaacgcatttttcgtatttcggctgggccgccccaggtggggtacatgtatgggatggtgatgcactggttgtagttttcgtggcctgggatggggtcattgtcgatgtatccaaggtggtggtagcgggctgtttcttcgctgatgcctcttgccgagaggaggtcgagtatgttttcgaggtgggtttcgtagagggccgaggctttctggattcggcggcgttccgcaatgttgtaggggcgtatgctgtcgtacattcgggttttctttctctagtcgttgttgtagcttgtggagtccgcctccgataccgcatgtgtggcagtaccagacgcccttgtcgaggttgatgctcatggagggctggtggtcgtcgtggaacgggcagaggatgtgttgctcgtttttggacggattgtagcgtatctggtaggtgtcgaggaggcggcaggtgtcagaggtgtgggaggagctcgttgagggttgataccacataggcttcgctccatggcttgttgcgctgtttcatcactacgagtccgatggtggaattgttttgtttgtttcggtgggtttcgtagttgcgtgcctcccggctggcttgtttcacgaattcggcgagatggggctggccagctttcgcttcgatcacataggtgtggttgccggttgtgaggatgaggtcgccttcgtcctctttaccgttgaggtggaggcgttcgatattgtggccggtgtcgcgtagctggtgcaataatcgtgtttcccattcggcgccggccctgcggttgcgtgcctgctgtgtggccatcatagtcctttgtgtgttgtggtcatgttccagggctgtttttcggcgagtggcccgaagaatgtgtattctgggtatgccctgagccgctcatattttgttccgtctgggctggatttgccggtgcgctgtttcaacactgcgatgcgagcctctgccggtatcgatagcccgttgccattatcctcgccaccatacaatgagactccgaggatgagttgtggtttttcggagagtccgtttttgatttccctccgtgccggggggtgttcgatgtcggagccggttttgtcggtggcgtggtgtgtgacaataatggtggagccagtgtcgcggcctaaggctgtgatccattgcatggcttcttgctgtgcctggtagtctgattcgcagtcttggatgtccatcaggttgtcgataacaatgatgggtgggaaagtgttccacatttccatgtaggcttgcagttccatggtgatgtctgtccatgtgatgggtgactggaatgagaaggtgatgtgcgcgccgtggtggatgctgtctcgatagtattctggcccgtagtcgtcgatgttttgttgtatttgggcggtggtgtgttgggtgttgagtgagatgattcgtgtggaggcctcccagggtgtcatgtcccctgatatgtagagggctggctggttgagcatcgcggtgatgaacatggctagcccggatttttggctgccggaccgccccgcgatcatgaccaaatcccctttgtggatgtgcatgtcctggtttcggtagaggggttctagctggggtatgcggggcagttcggcggctgtttgggaggccctctcgaaggatctttggagagagagcatcggagccttaatctatctattggttgggtgtgttttggtggtcagatggagtcgatatcgatatcagcattagcgggggctgtggtgtcgtctagctggccgttatcgcgcttgtctacgtattcggcaaccttatcgtagatggcgtcgtcgaggggtttgagcacgaccgcgttgaacccgtttttggtgcgcacggtggcgagtttgaaggcctgctcttcgccgagatatgcttcgaggtcgcggatcatggagtgtgggcggtcgttgttgccgcgcgctttttcgatgatggcgttggggatggtttctggggtgccgttgttgagatcctggaaggtgtggaagatggtgacatcagcgtagatgcggtctgctgtctgtccgccgtagccttcagtgttgtgctgaacgtcgcggactttgaaggcgatggcggtggcgtcctggtttcgggaggggttgaagaaggtgctgctgctgttgcggtagttggcgagtcccattgttgtttcctttactgttttgttggtttgtgttggctggtattggtttatcgggtgaggctgtttcgtttgctgcggaacgcctcagacacgtcactgttactggtgatgatctttttgtactgtttgagaaggtctgctagctgtgctttgctggtggctttgttgatccggtcgataataatctcgttttcctggttggcgatcttgttgacgtagtctttggcggctttatcgtatcggtcttgaagcaggattgctgcgctagcgatgagggttgcgaggtcccagtctttggatacggtttcgtctttcaatcctcctagcagatcaataatggattgtttgatgtcttctgcggtgtctccgcggatgacggcccatggggcagcatagtctccaccatatttgagtgtgatagttagctttccgctgtctgtggtgtgctcgtcggtcacgtgttttccttttctttcttgtctgtttggggtggctgtacggtggtttctatcgggtatctgtaggcgtttttcccgttgacagcccagcaggcgtccctgacggggcatcctttacagagtgctgtgacgtggggtacgaagatgccttgactgattcctttcattgcttgactgtacatggatgatacatgccggtaggtgttgttgtcaaggtcgtagagttcggttgctgtgccctgctcgactgattgctcgtctcccttggtggtggcgggtgtccaaaacatgcctttcgtcacatggatgccgtgttgttctagcatgtacctgtatgtgtgcagctgcatactgtcggctggtaggcgtcctgttttgaggtccaaaatgaaggtttcacccgtattcgtgtctgtgaatacccggtcgatgtagccgacaatctgggtgccgtcttggagggtggtttctaccgggtattcgatgcctggctggccgtcaataacagcggtgatgtattctgggtggttgcgcctccatgttttccaccggtccacaaaggtgtggccgtagaccatccaccagtcgtagtctttcttgtgtggcccgcccgactcgcacatgtttttgcatattctgccggagggtttgatttctgtgccttcggattcggcgagggctacttgtgtggcgaaaatgtttgtgaaagatgagagtttgtctggcagtgcagggtattcggcgggattgtacaggtgtaggtcgtattgttcggtgatgtggtgtatggcgcttccggcgatggtggcgtaccaggtgtggtgttgggtgtggtagccgtgggataggcgccatttttctccgcattcggcccactgggtgagtgaactgtaggagatgtggcctggatggtggatggttttcggatattgtgctagaggcattacttgtcgcttttattccatgggttgcgggtgtcttggccggcctggtgttgctggtaggcgaggagtgcgaggcagtgccaggcagcatgggccagatggggtagcccggattcataatcgaggttgttgccttgctgccatgatagtaggtgcctgtagagggcgtcgacgctgtggctccacgggtagccgccggtccagttgttgtcgccatatttggtggcgccgtatccggccacagagcctagggcgtgaagggatgctgggtcgatgagggagagtctgcaaagtttcaattcttttcgggcaccagtatcagggtcggtgtacatgctggtgggctcatccatggggtgtgtgctccttacgtgtggggttactggttggggttgtgggctagggcgacggcgagaataatgatggcgagggtttcagcgatgaggatgggtgctgtgatcatttggtgtttcggggattgttggtgagtgtggaggcgcctagcaggatggctagcgcacagacggctgtgatggcgagggctgccttgtggccggtgccggttgcgtacatccatgtgatgatggcgccttggatccatgccagtgcggtgaagaacgtttcgtagctgtgcagctcaatgttattgttgggtgtgttcatgcttgctcctgaagaatggtgttgatggttttataaatgttgtacaggtctgtttcgatagataacagttggttgatttggtggtcgagattaatgtttgggttgagggtgttgatgcgggaggcgatatcggtggctgtgcgtagtgtgccgccggtgtggtgaataatgtgtgccgtgtcggcgagtccggtggtgacagcgtagtgggataggagaggcatgactgggggatgctccttggcgggttactgttgcgggttgatgttgaggtcggtgacgtgcgggtgttcttctgttcctgtgacgaggcagtggacggtgactgggagtttggatgcgccgggctgtttcatggttgcgccgtagacgatgctgaatgtgtctttaccaataattttgtggagttggaggtcgatgtcggggttgccgttccagttgacaccgtgtgcggcggcctgttgttcggctttgcggttgcaggtgtgtgctgccgtgatcatggtgagaccttgtgaggtttcttcaccccttgcttgggcttgctggtgggctttggcctgctcggctcgcagtgactgttctgcggctgcctgccgtgccgctttctcggctttgcgctgctgagcggtttcaggtgtccaggtggtgttggctgtggtggcttggggtgcgggttgtgaggcgagtggcggattgtcgtctggggctggcatgaatgagacggcggcaatgatggcggctgtgattccggcgatggtgtagccgtttttcttgttcatgttttgtgtcccctttccggggtgttgttcgttgctgacatgattaatcatggtgtgggcggtggcctgtgtcaaggctgcgctcaacgattgtgagcgatccttgtatggctaggtgttttatcgggcgcacagggtgagtagatggccaacattgatgcggctcacattccagtagagttgtgtggcttcaccgccggtgagtggcttccactcgttgtggctgaacacggtgccatcggatgctatgaatatgtcggggcgtagcttgtggagttcaatctctacgctctgccggtaggcttcggcgaggccctcaaaatccatgtggttgcaggagaggttttcgaggcgtgtcaggtcgaagggtgtggggcagtcgtagctggcgggggtgtagagctgggtgaagtggttggcgatcttctgcatcatgattccttttctggtgatggtgtgttgatggttttatcgtgtggattcggcgatgatggcatccacatcgattgtgtcgatcatgtcgtggaggtcttcggcctcatccacggtgagtggctgccaatcctggggtccgtatatggcaccgtcgagagtgatggtccacaggggccggatgagtcgtacggcttcttcgactttggcacggtataggcggcagatgatagacgtgtgggtgttacctatgtcacatcctgccaggtgtgcggggtggagtgggttgatttctgtctgcccgtagaggctggtgaaggatggtgtgatgagtgtgccatccatgggtgatgttcctttctggactgtctgggttggttgttgtggtttctagagtgtgtaggttgcaaccgggagtcaaggctgcactcattcggattgagcgtttcatggagggtgtgtcaggtgtgacagatgtcactgaagcctttattgcctctctcagcgcctgaaatcttctgggggtaggattatatagggttgaccctggtagtcgattctagaccccatacagggcgtctcaggggtatgtctgggtgatggcgggtatggcaggtgatctagcgggtcgagataggcctgcatcgcaaaggtcgaggttccagatctgggcatggaatctacaccctcatactgtgtgagatgtatcacatcctcctggcttggtgtgtactctcgagactactctgccgatctgacatggagggtgtagcccagaaataccatttaaagccttcacacggcgcctaggagcgccttacagggtgggggctatgtatttatacccccagcacattctgatcgattctagacgcccccaaaagcctgatacacgatcaaccatttcggcatagatcatcagcccctatcctgcttagctaagcctcaactatgtggacagtgttggatgctaagagggaagaaggacacggtaaaaagaagagggggagcatcagccttcacacctgaggtacttaagttcacattaaagtcttagcactcagtacttagcaccgagcccctcaagggctcggcatcagcccaaacaggctcagccgatcaggcacagcactgaaaagggtacacgccatcagggaaggcttgagagtacgaggagcctcagcgacgcgtactcgaaagcctgagggaacacccatcagcactgatgggcctagcgtgttcggaaaggacacaggagtgaagtgtgacagctgtccgggagtgaaacctgttctggctaggggtttcagccttaaccaccctcaaaggttacaagactctaagaaaatttaagaaaactcttaggaagaaagttgtgttcatatccccctaaaaacacccaaaatagccctcaaacccgcctatagagccaaacagtcaagtttgactcgtctagacggcgtatgctaggctggacaggtagccagctggacgcaaggccagaaagtgctgacgcacttcccgacctcgcttaccatcagtctaccaaacactttaaagcttcaaggctaagcgctaagcctttaagaccttaacgcttagcaccgagcccctcaagggctcggcatcagccttaaagttttaaacactttaagtaactataaagctttaaaccttaacacctaagttaagtataaaaccttaaaggcttagcacttaaggatataaactttacatcagtgtttaagactttaaaacttaaagtaactataagactttaaagaccttaagtacttaaagttaatcatcagtcttaaactttaatattataacctataagtcttaaagcttataggtataataatataatataagttataaaagttttagaagagctaaagggttaacttctttacttctcttctctctttggttctttctctcttctcttcttttcttcatcaggggagaagaggaacctttaccgtcaacgctgatggacttttcgccgtgtgactcgtgtaccaccggtcgcacgctcccggttgcacactcaccacacttactctacccgtgtccctttcaggcttggcgtgttcggctgaaggcgtacggcgtgtcacgctaaaacccttaacactaggtaagacttaaagtgtatattatatgtagaagactttaaaaaacctataaggtattcctgcttagcccgtgtcctactctgctaggcgccaagcgctaagccttgaaacgcgaacacccatccacccccatttttcttccgtgtccttcttcttttgacaccgctggggggcgatgtgatctttctcacatgccaggggatgtgagggaaaacaaacaccccggcacaaacagaacaccccctcaaacgaacaaaacagccctcagaatcgatgagcagggcaagggcaaggtattcatacccccaacggttcccaggctgttacaggagcaatgagagcccatagaggcgtggtagacgataggggagcgttatggcacacaccaaccgcaccgcatccgcctcacaccgacgctggcgggctcgactcataacccaggccagacagcaaggccaaaccgaatgcccactctgcggagcaaccatcacctgggacacacaccagctaccaaccagccccgaagccgaccacatcacacccgtcagccggggaggactcaacaccctcgacaatgggcaaatcatctgcagaacatgcaacagaagcaaaggtaatcgcagcgaaccaaacatcacattccaacaacaaaccacaaaaacattgattccatggtgaaaaacccgccaacccccaccggggacaccccctgcacacccgtgcaagacc

SEQ ID NO: 43 - DNA, 29453 bp, unidentified
  source 1..29453: mol_type = unassigned DNA; note = Bacteriophage of P. acnes
agtgaaatacctcccttttgtggatttatctgtttgtcgactttttgtgttggtggtgagtgttgtgcagcctgagcttcctgggtctcgtgattggtgtggggagacgcttcgctggtggcgtgtgtggggtgaggatagtcgcgcatcgtacgtgtcggatgaggagtggctgtttctcatggatgctgcggtgattcatgattgtgtgtggcgtgagggccgggctgaccttgtggcttcgcttcgtgctcatgtgaaggcttttatgggcatgttggatcgttattcggttgatgtggcgtctggtggccgtggtgggggttctgcggtggcgatgattgaccggtatcggaagcgcaagggggcctgattaggtgtctggtgttgttgggtctcaggtgcctcgtcaccgtgtggctgcggcgtattcggtgactgccggcggggatgctggggaattgggtcgtgcgtatgggttgatgcctgatccgtggcagcagcaggtgttggatgattggcttgctgtcggtggtaatggcaggcttgcttctggtgtgtgtggggtgtttgttccgcggcagaatggcaagaatgctattttggagattgtggagttgtttaaggcgactattcagggtcgccgtattttgcatacggctcacgagttgaagtcggctcgtaaggcgtttatgcgtttgaggtcgttttttgagaatgagcggcagtttcctgacttgtatcgtatggtgaagtcgattcgtgcgacgaatggtcaggaggctattgtgttgcatcatccggattgtgccacgtttgagcgtaagtgtggctgtccgggttggggttcggttgagtttgtggcccgttctcgtggttctgctcgcgggtttacggttgatgatttggtgtgtgatgaggctcaggagttgtcggatgagcagttggaggctttgcttcctaccgtgagcgctgcaccgtctggtgatcctcagcagattttccttggtaccccgccggggcctttggctgacggtagcgtggtgttgcgtcttcgcgggcaggctttgtcgggtggtaaaaggattgcgtggacggagttttcgattcctgacgagacggttccggatgatctatcgaggtcgtggcggaagttggctggggatacgaatcctgcgctgggtcgccgcctgaatttcgggacggtgagcgatgagcatgagtcgatgtcggctgccgggtttgctcgggagaggcttggctggtgggatcgtggccagtcggctacgtctgtgataccggccgataagtgggctcagtctgctgtggatgaggcgagtctggttggcgggaaagtgtttggtatctctttttcgcgatcaggcaatagggttgctttggctggtgccggcaggactgatgctggtgttcatgttgaggttattgatggcctgtcggggacgattgtggatggtgtaggccagctggctgactggttggcgttgcgttggggtgacacggaaaagatcatggttgccggttcgggtgctgtgttgttgcagaaggctttgactgatcgtggtgttccgggtcggggtgttgtggttgccgatactggggtgtatgtggaggcgtgtcaagcctttctggaaggcgtaaggtctgggagtgtttctcatcctcgtgctgattctcgccgtgacatgttggatattgctgtaaggtcggcggttcagaaacataaaggctctgcgtggggttggggttccacatttaaggacggttctgaggttcctttggaggctgtgtcgctggcgtattttggtgcgaaaacagttaaagcgaagcggcgtgagcgtagtggtaggaagcgggtgtctgtggtatgaactcggatgagttggctctgattgagggcatgtttgatcgtattaagagtttgtcttcgtggcattgtcgcattgagggctactatgagggttctagccgggtgcgtgatttgggggtagctattcccccggagttgcagcgtgtgcagactgtggtgtcgtggcctgggattgcggtggatgctttggaggagcgtctggattggctgggctggactaatggtgacggctacggcctggatggtgtgtatgctgcgaatcggcttgctacggcgtcgtgtgatgtgcatttggatgcgctgatttttggtttgtcgtttgtggctatcattcctcatggtgatggttcggtgtcggttcgtccgcagtcaccaaagaattgtactggccggttttctgccgatgggtctcgtctggatgctggccttgtggtgcagcagacgtgtgatcctgaggttgttgaggcggagttgttgcttcctgatgtgattgttcaggttgagcggcggggttcgcgtgaatgggttgaggtggatcgtataccgaatgtgttgggtgctgttccgcttgtgcctattgtgaatcgtcgccgtacttctaggattgatggccgttcggagattacgaggtctattagggcttacacggatgaggctgtgcgcacactgttggggcagtctgtgaatcgtgatttttatgcgtatcctcagcgttgggtgactggcgtgagcgcggatgagttttcgcagcctggctgggtcctgtcgatggcttctgtgtgggctgtcgataaggatgatgatggggacactccgaatgtggggtcgtttcctgtcaattcgcctacaccgtattcggatcagatgagactgttggcgcagttgacggctggtgaggcggctgttccggaacgctatttcgggtttatcacgtctaacccgcctagtggggaggctttggcggccgaggaatctcggcttgtgaagcgtgctgagcggcgccaaacgtcgtttggtcagggctggctgtcggttggtttcctggctgccaagtcgcttgattcttccgttaacgaagctgatttttttggtgatgttggtttgcgttggcgtgatgcatcaacacctactcgggcggctacagcggatgctgtgacgaagctggttggtgccggtattttgcctgctgattctcgcacggtgttggagatgctggggcttgatgatgtgcaggttgaggctgtgatgcggcatcgcgccgaatctgcggatccgttggctgcgcttgctggggctatttcccgtcaaacgaacgaggtttgatggatggcttcgggtgctatgtcgaggctggctgcgactgagtatcagcgtgaggcggtcaggtttgctgggaagtatgcgggctattattctgagcttggccgtttgtggcgtgccggcaggatgagtgacacacagtatgttcgtttgtgtgtggagttggagcgtgccggccatgatggttcggcgtcgttggccgccaggtttgtgtcggattttcggaagcttaacggtgtcgatcctggtttgattgtgtatgacgagtttgatgctgccgcggctttggctaggtcgttttcgactatgaagattatgaatagtgacccggatcgggcgaatgatacgattgatgcgatggcggcgggttttgatcgggctgtcatgaatgctggtcgtgacacggttgagtggtctgcgggtgcgcagggtaggtcgtggcgtcgtgtcacggatggggatccgtgtgctttttgtgccatgttggctacgaggtcggattatacgactaaggaaagggcgctcactactggtcatacgcggcgtcataagcgtggtggtaagcgtccgtttggttcgaagtatcatgatcattgtgggtgtacggtggttgaggttgttggcccttgggaaccgaatagggctgatgccgagtatcagaggacgtatgagaaggctcgcgagtgggttgatgatcatgggttgcagcagtcgcctggcaatattttgaaggctatgcgtactgttggtggcatgagataatttgatgtggtttccggttgtgcgccgccggttatcggtgcacagggttgtctcccgcacgggggtcaacaatgttgtgttgttttccgcaaggagtgtagggttaggctatggccgatcagagtgttgaggaacagaatgttgacaatgatgttgtggagtccggaaagggtgacggcattgttgacacggtgaagggcgatcaaggcaaacaggttgaagatcagtcgaagaatgaaggcgagggtaaatcgccggggactgattggaaggctgaggctcgtaaatgggagtctcgtgcgaaaagtaatttttccgagctggagaagcttcgtacatcgagtgacgattctggatctactattgatgagcttcgccgcaagaatgaggaactcgaagacaggatcaacgggtttgttcttgagggtgtgaagcgtgatgtggctgccgagtgtggcctttcgggtgatgctgtcgcttttctgcacggcgacgatcgtgaagcgctggtggagtctgctaaggctttgaagggtttgatcgaccatagtagtggtggcgcgggtgtgcgccgtcttgcggggagtgcccccgttgatgatgttaaacgacgtgagggtgtcgcgtttgtggatgctcttgtcaataattctaggagatgatttgtgatggctgacgattttctttctgcagggaagcttgagcttcctggttctatgattggtgcggttcgtgaccgtgctatcgattctggtgttttggcgaagctgtcgccggagcagccgactatttttggccctgtgaagggtgccgtgtttagtggtgttcctcgcgctaagattgttggtgagggtgaggttaagccttccgcgtctgttgatgtttcggcgtttactgcgcagcctatcaaggttgtgactcagcagcgtgtttcggacgagtttatgtgggctgatgctgattaccgtctgggtgttttgcaggatctgatttccccggctcttggtgcttcgattggtcgcgctgttgatctgattgctttccatggtattgatccggctacgggtaagcctgctgcggctgtgaagacttcgctggataagacgaagcatgttgttgatgccacggattctgccacgactgatctggtcaaggcggtcggcctgattgctggtgatggtttgcaggttcctaacggtgtcgccctggatccggcgttctcgtttgctctgtcgactgaggtgtatccgaaggggtctccgcttgccggtcagccgatgtatcctgccgccgggttcgctggtttggataattggcgcggcctgaatgttggtgcttcttcgactgtttcgggtgccccggagatgtcgcctgcctctggtgtgaaggctattgttggtgatttctctcgtgtccattgggggttccagcgtaacttcccgatcgagctgatcgagtatggtgacccggatcagactggccgcgaccttaagggccacaatgaggttatggttcgcgccgaggctgtcctgtatgtggctatcgagtcgcttgactcgtttgctgttgtgaaggagaaggcttccccgaagcctaatccgccggccgagaactgatttatttgttgcgataatgttcatgctgtgtgcagggggtggtgttgatgggtatcattttgaggcctgaggatattgagcctttcgccgatattcctaaagataagcttgaggcgatgattgccgatgtggaggctgttgctgtcagtgtcgccccctgtatcgctaaaccggatttcaaatacaaggatgctgctaaggctatcctacgtagggctttgctgcgctggaatgatactggtgtttctgggcaggttcagtatgagtctgcgggcccgtttgctcagactacacggtctagtactcccacgaacttgttgtggccttccgagattgccgcgttgaagaagctgtgtgagggtgatggtggggctggtaaagcgttcactatcacaccgaccatgaggagtagtgtgaatcattctgaggtgtgttccacggtgtggggtgagggttgctcgtgcgggtcgaatattaacggctacgctggccctttgtgggagatatgatatgaccagttttccttacggtgaaacggttgtgatgcttcagccgactgttcgtgtcgatgatttgggcgacaaggttgaggattggggtcatcctgtagaaaccgtgtaccataacgtggctatctatgcttccgtttcgcaggaggatgaggccgcggggcgtgattctgattatgagcattggtcgatgcttttcaagcagcctgttgtgggcgctgattatcgttgtaggtggcgtattcggggtgtggtgtgggaggctgacgggtctcctattgtgtggcatcacccaatgtctggctgggatgctggtacgcaggttaatgtgaagcgtaagaagggctgatggttgtggcacgtgatgtgaatgtgaagcttaatcttcctggtatccgtgaggtgttgaagtcttctggggtgcagggcatgttggcggagcgtggcgagcgtgtcaagcatgcggcctctgctaatgttggcggtaatgcttttgatagggcccagtatcgtgccgggttgtcgtcggaggtgcaggttcaccgtgttgaggctgtcgctaggattggcaccacctataagggtggtaagcgtattgaggcgaagcatggcacgttggctaggtcgattggggctgcgtcgtgatcgtttacggtgatccgcgaatatgggcgaaacgcgtgctcaaggatgatggctggctgtccgatataccgtgtacaggtactgtcccggatgatttcacgggtgacttgatttggttggcgttggatggtggcccgcagttgcatgttcgtgagcgtgtttttttgcgggtgaatgtgttttctgatatgccggatcgtgctatgtctttggcgcgtcgtgttgaggctgtgctggctgatggtgttgatggtgatccggtggtgttttgtaggcgttctactggtcctgatttgttggttgatggtgcacgttttgatgtgtattcgctgtttgagctggtgtgccgtcctgtcgaatccgagtaaacgtatttgttttctatattttgtttttgtttgattatttttgggggttgtgatggctgctacacgtaaagcgtctaatgttcgctctgctgttacgggtgacgtctatattggtaaagctcatgccggtgacactattgatggtgtgaagacggttcctgacggtcttaccgctttagggtatctgtctgatgacgggtttaagattaagccggagcgtaaaacggatgatttgaaggcttggcagaatgcggatgttgttcgcactgtggctacggagtcgtctatcgagatttctttccagctgatcgagtctaagaaggaggttatcgaactgttttggcagtcgaaggttactgccggagccgattcgggttcgttcgatatttctcctggtgccacgacgggtgttcatgccctgttgatggatattattgatggcgatcaggttattcgctactatttccctgaggttgagttgattgatcgtgacgagattaagggtaagaatggcgaggtgtacgggtatggtgtgacgttgaaggcgtatcctgcccagattaataagaatggtgatgcggtgtcgggtcgggggtggatgacggctttaaaagctgatactcctccgactcctcctccggccccgaagcctccgaagcctgagccggatccgaatccgccgtctaataactgatacacatagtttgagggattgttgatagatgagtgacacaggttacacgttgaagattggtgaccgtagctgggtgttggcggatgcggaggaaacggcgcaggctgttcctgcccgcgttttccgtcgtgccgccaggattgcccagtcgggggagtctgcggatttcgcccaggttgaggtgatgttttctatgttggaggctgccgccccagaggatgctgtggaggccttggaggggcttcctatggttcgtgtggccgagattttccgccagtggatggaatataagcctgaaggtaagggtgcctcgctgggggaatagtttggctccacggcctgattgatgattatcgtggggccatcgaatacgatttccgcactaaatttggtgtttctgtttatagtgttggtggcccgcagatgtgttggggtgaggctgtccggctggctggcgtgttgtgtaccgatacgtctagccagttggcggcccacctgaatggttggcagcgcccgtttgagtggtgtgagtgggctgtgctggacatgttggatcattacaggtctgctaatagtgaggggcagccggagcctgtggcgaggcctacggatgagcgtagggcccggtttacgtctgggcaggtggacgatattttggcgcgtgttcgtgccggcggcggggtgtctcgcgagattaatattatggggtgaatagtgtatgtctggtgagattgcttccgcatatgtgtcgttgtatacgaagatgcctggccttaaaagtgatgttggtaaacagctttctggggttatgcctgctgagggtcagcgttcgggtagtctttttgctaagggcatgaagttggctcttggtggcgccgcaatggtgggtgctatcaatgttgctaagaagggcctcaagtcgatttatgatgtgactattggtggcggtatagctagggcgatggctatcgatgaggctcaggctaaactgactggtttgggtcatacgtcttctgacacgtcttcgattatgaattcggctattgaggctgtgactggtacgtcgtatgcgttgggtgatgcggcttctactgctgccgcgttgtctgcttcgggtgtgcagtctggcgggcagatgacggatgtgttgaagactatcgccgatgtgtcttatatttcgggtaagtcgtttcaggatacgggcgctatttttacgtctgtgatggctcgcggtaagttgcagggcgatgacatgttgcagcttacgatggcgggtgttcctgtgctgtctttgcttgccaggcagacgggtaaaacctcggctgaggtgtcgcagatggtgtcgaaggggcagattgattttaacacgtttgcggctgcgatgaagcttggcatgggtggtgctgcgcaggcgtctggtaagacgtttgagggcgctatgaagaatgttaagggcgccttgggctatcttggtgctacggctatggccccgtttcttaacgggttgaggcagatttttgttgcgttgaatccggttattaagtcggtcacggattcggtgaagccgatgtttgctgccgtcgatgctggtattcagcgtatgatgccgtctattttggcgtggattaatcgtatgccgggcatgattacgagaatgaatgcacagatgcgcgccaaggtggagcagctgaagagcgtttttgcgagaatgcatttgcctgtcccgaaggtgaatttgggtgccatgtttgcgggtggcacagcagtgtttggtgttgtggctgcgggtgtggggaagcttgttgcagggtttgccccgttggcggtgtcgttgaagaatcttctgccgtcgtttggtgctttgaagggtgccgctggcgggcttggcggcgtgtttcgcgccctgggcggccctgtcggtattgtgatcggcttgtttgctgccatgtttgcgacgaacgcccagttccgtgccgcggtgatgcagcttgtggctgtggtgggccaggctttggggcagattatggccgctattcagcccttgtttggtttagtggccggtgttgtggcacagttggcgccagtgttcggccagattatcggtatggttgccggtttggctgcccagattgtgcctttgattagtatgcttgtcgcccggctggttcctgtgattacgcagattattggtgcggtgactcaggttgctgcaatgttgttgccggcgttgatgccggtgcttcaggcggttgtggctgtgatacggcaggttgttggtgttgtgatgcagcttgtgcctgtgttgatgcctgtgattcaacagattttgggtgctgtgatgtctgtgttgccgccgattattggtttgatacggtcgctgataccggtcatcatgtctgttatgcgcgtagtggtgcaggttgtttcggttgtgttgcaggtggttgcccgtattattccggttgtgatgccgattgttacggctgtgatcgggtttgttgcacgtattttgggtgctattgtgtcggctgccgccaggattattggggctgttgcccgtgttgtcggatgggttgtgggccatttcgtgtcgggtttggcgcgtatgggttcggttattcaggctggctggaatcatattagggcttttacgtctgcgtttattaacggtttcaagtcgatcatttctggcggcgtgaacgcggttgtcgggttttttacgcggcttggtttgtcggttgcctcccatgtgaggtctggttttaacgcggcacgtggtgctgtttcttctgcgatgaatgctatccgtagtgtggtgtcttcggtggcgtctgctgttggcgggtttttcgggtcgatggcgtctagggttcggaatggtgctgtgcgcgggtttaacggggcacggagtgcggcctcttctgctatgcatgctatggggtctgccgtgtctaacggtgtgcatagtgtactgggttttttccggaatctgcctggcaatattcggcatgctctcggcaatatggggtccctgttggtgtctgctggccgtgacgtggtgtctggtttgggtaatggtattcggaatgctttgagtggcctgctggatactgtgcgtaatatgggttcccaggtggctaacgctgcgaagtctgtgttgggtattcattccccgtcgagggtgtttcgtgatcaggttggccgtcaggttgttgccggtttggctgaggggatcaccgggaatgctggtttggcgttggatgcgatgtcgggtgttgcttcgcagcttccggatgctgtggatgcccggtttggtgtgcgatcgtctgtgggctcgtttaccccgtacgaccggtatcggcgtgctcagggtgagagtgttgtggtgaatgtgaatggcccgacgtatggtgatcctgccgagtttgcgaagcggattgagcgtcagcagcgtgacgctttgaacgcgttggcttatatgtgagtaaaggggtatgcatgtttattcctgacccgtctgatcgttctggtttgactgtgacatggtctatggatccgcggtttggtgatgagcgtgtgcttcatttgacggattatacggggtcgtctccggtgatgttgttgaatgattcgttgcgcggtttgggtgttcctgaggttgagcatttttctcaaactcatgttggggtgcacgggtcggagtggcgcgggtttaatgtgaagcctcgcgaggtgacgttgccggtgttggtgtcgggtgttgacccggatccggtgggcgggtttcgtgacggttttttgaaagcctatgacgagttgtggtctgcgtttcctcctggcgaggagggggagctgtctgtgaagactcctgccggtgtagagcgtgtgttgaagtgccggtttgattcggtggatgacacgtttacggttgatccggttaatcgtggctatgcgcgttatgtgcttcatttgacggcctatgacccgttttggtatggggatgagcaaaagtttcgtttcagtaacgcaaagttgcaggattggttgggtggcggccctgtcggcaaaaacgggactgcttttccggtggtgttgacgcctggtgttggttcgggttgggataacctgtcgaataagggtgatgtgcctgcgtggcctgtgattcgcgttgaggggccgttggattcgtggtcggtgcagattgatggtttgcgtgtgtcttcggactatcctgtcgaggagtttgattggatcactattgatacggatcctcgtaagcagtctgcgttgttgaacgggtttgaggatgtgatggatcgcctggatgagtgggagtttgcgccgattccgcctggcggttctaagagtgtgaatattgagatggttggtttgggtgccattgttgtgtcggtgcagtacaggtttttgagggcgtggtgaattgttgtggctggtcttgtcccgcagataacattgtttacgccagactatcatcgtgtggcgcctatcaatttttttgagtcgctaaaattgtcgttgaagtggaatggtttgtcgacgctggagttggtggtgtctggtgatcattcgaggcttgacgggttgacgaggccgggtgcacgcctggttgttgattatggtggtggccagattttttctgggcctgtgcgtaaagtgcacggggttgggcctcggcggtcttcccgtgtgactatcacttgtgaggatgatattcgcctgttgtggcgtatgttgatgtggcctgttaattatcgccccggtatggtgggttctgagtggcgtgcagaccgggattatgcccactattctggtgcagccgagtctattgctaagcaggtgttgggggataatgcttggcgttttccgcctggtttgttcatgatagaggatgagaagcgtggccgctatattaaggattttcaggtgcggtttcacgtgtttgcggacaagttgttgcctgtcctgtcgtgggctcggatgactgtttcggtgaaccagtttgagaatgcgaagacggatcagcgggggctggtgtttgattgtgttcctgctgtgacgcgtagccatgtgttgacgtccgagtcgggttcgattgtgtcgtgggagtatgtgagggatgcccccaaggctacgtcggtggttgttggtggccgcggcgagggtcgggatcggctgttttgtgaggatgttgattcgatggccgagggggactggtttgatcgtgtcgaggtgtttaaggatgcccgtaacactgattcggataaggtgtctctttacgatgaggcggagcaggtgttgtcggaatcacaggccacgtctggttttaagatcgagttggccgagtcggatgtgttgcgttttgggcccggcaatctgatgcctggggatttgatttatgttgatgtgggttcggggcctattgcggagattgttcggcagattgatgtggagtgtgattcgcctggtgacggctggacgaaggtgacaccggttgcgggggattatgaggataatccgtcggcgttgctagcgcggcgtgttgccggtttggctgccggtgtgcgggatttgcaaaagttttaaaaaagctcaacggattggggtttgttgtgggtattgtgtgcaagggttttgatggtgtgttgaccgagtatgattgggctcaaatgtctggtctgatgggtaatatgccgtcggtgaaaggtccggacgattttcgtgtcggcacgacgattcagggtgccacagtgttgtgtgaggttttgccggggcaagcgtgggctcacggggtgatgtgtacttcgaatagtgttgagacggtgacgggccagctgccgggtcctggcgagacgagatacgactatgttgttctgtcgcgggattgggagcagaatacggcccggttggagattgttcctggggggcgtgcggagcgtgcccgtgacgtgttgcgtgccgagcctggcgtgtaccatcagcaactgttggctaccctggtgttgtcgtctaacgggttgcagcagcagctggataggcgtgccgtggcggctagggtggcgtttggggagtctgctgcgtgtgaccctacccctgtggagggtgacctggtgatggttccttcgggggctgtgtgggctaaccatgctggcgagtggaggctgttgtctccgcgtatcgagacgggttcgaagtcgatcatgtttggtggatctaatgtgtatgcttacacgatcccgtttgatcgccagtttactagtccgcctgttgtggtggcgtctatggggaccgcggctgggggtacgacacagattgatgtgaaagcctacaatattactagtaaggattttggtttggcgtttatcacgaatgacgggtctaaaccgaatggtgtgcccgcggtggctaactggatagctgtgggcgtgtgacggtacaggcgttgtggtggctggtgtgatgttggggggctgccgtgtcgtggatgactcctgcattggtggcttctatttgtaccgcgttggccacggttttgggttctgttcaggctatcacatcccggtctagaaagcgtttgcgaaggttgtctgcgcaggtggatgctttggaagagtatacgtggggtgtgcggcgtgaggttcgccggtttaacgccaggcttcctgacggggttgatccgcttgtgttgcctgagccgcctggtttcctatcggatgatgttgggggtgagtgatgagggagttggaggaggagaagcggcagcgtcgctcgtttgagagggcttccctgctgttgttgtttttgtcgcttgtgctgttgattgtggttgctgggggtgctttgcgtttcggggctgtatcctctgaacgggattctgagcaggcgagggcccagtcgaatggtacagcggccaggggtttagccagccgtgtgcggcaggtgtgtgcccatggtgggatggagtcggtacggcttcaccggtctggtttgtgtgtggatgctgtgcgtacggagcggagtgttcagggtgtgccgggcccggctggtgagcgcggcccgcaaggccctgcaggtgctgatgggcgtgacggtgttaatggttcgtctgggctggttggccctgttggtccgcagggttctcccggcttgaatggcgtgaaaggtcctgacgggttgcctggtgcaaatggatcggatggccgtgatggtgttccgggccgtgcaggtgttgacggcgctgatggtcgggatggttcggctggtgagcgcggtgatgtgggtccttcaggtcctgccggcccgcaaggtgcacagggggaacggggtgagcgtggccccgtcggtgcgaacggatccgatggtaaagatggtaaggatgggcgctcggtggtgtctgtgtactgttctgatggtctcctggttgtgaaatatagtgacggtgtggcttctacaatatcgggctcggtggcctgccagggtgtgaaaccgtcgcctatggtgactatatcatcccacaaatagaaaggagtggctgtgatggtagtgtttggtggtggtgtgtggtgaggtttatcccagcagcgcaccattctgccggttcgaatagtccggtgaatagggttgtgattcatgcgacgtgcccggatgtggggtttccgtccgcctcacgtagggggagggctgtttctacggcaaactattttgcttccccatcgtctgggggttctgcccattatgtgtgcgatattagtgagacggtgcaatgtctgtctgagtctacgattggttggcatgccccgcctaaccctcatagtttgggtatagagatttgcgcggatggtggctcgcacgcctcgttcagggtgccggggcatgcttacactcgtgagcagtggcttgaccctcgcgtgtggcccgcggtggagcgtgccgcgatcctgtgtagacgtttgtgtgacaaatataatgttccgaaaaggaagcttagtgcagccgatttgaaggctggcaggcggggtgtttgcggccacgtggatgttacggatgcgtggcatcagtcggatcatgacgatcctgggccgtggtttccgtgggacaaatttatggccgtagtctgcggcggtagtggtagtgaggagttaactgtggctgatgtgaaagccttgcatgatcagattaaacaattgtctgcccagcttactggttcggtgaataagctgcaccatgatgttggtgtggtacaggtacagaatggtgatttgggtaaacgtgttgatgccttgtcgtgggtgaagaatccggtgacggggaagttgtggcgcacgaaggatgctttgtggagtgtctggtattacgtgttggagtgtcgcagccgcattgacaggcttgagtctactgttaacggtttgaaaaagtgatggtggtttgttgtgggtaaacagttttggttaggtttactggagcgggccctgaaaacttttattcaaacgtttgttgccgtgctcggtgttactgcgggtgtcacgtatactgcggagtcgtttcgcggtttgccgtgggagtcggcgttgatcacagccacggttgctgcggtgttgtcggttgctacttcgtttggtaatccgacgtttgtggctggtaagccgaagactacggttgtggataccgggcttgttccacccgatgataccggtttgatagaaccgcatgcggtggatgtgtcggatcctggcatgattgagccgatggatgatgcggatgttgccggctatgtgccgaagcgggctgccgagtcggaggttggcacagtagagtctactgttgcataattgaatatgtgtgtgccccagcggtgctgccacgattgtgtggtggttgccgctggggcacactttttgtttatgcgatatggctatgattcgttgctgtcgatggtgtcttcgagcatctgatacaggtggaggcaggtgcagatggtttcgctggcctggtcgagaacgtttcggccgataacgtttttgtggttgtcgcggtggcggatgatagcccacatgatctcgtcggctgccgcctgtaatagttttgcctggtatgcgattccggcgagccagtctagtgcttcctggcttgcctgtgtgtcgtctggaataccacgggtgttgctgttgcttgggtgtccttcactgtcgcatagccacaggatttcgctgcactcgtctagcgtgtcctggtcgatagcgagatcgtcgaggctgacattgttgacggtaaggttcacgttgtcgagggagatgggtacaccgtactggttttcgacactgtcaacaatgttttgtagttgttgcatgttggtgggctgttgttggatgatacggtgtaccgctgctttgagggcagtgtaggggatattgtgtgtgttgttcatggttttatttcatccctgtgctgtcgtcgttatcgtctggatagtatctactgtttgcgtaccctgttagggtgatcaatgtttggtctgcccactgtttcacggtttgccgggttacccctaatcgttgggctgctaccgaataggtttgatcatacccgtatacttcccggaatgctgccaaccgtgctaggtgttttcgctgtttggatggctggcaggtgagggtgtagtcgtcgatggccagctggaggtcgatcatggagacgatgttgttgccgtgatgctggggggcggttggtgggggtggcataccgggttctactgatggtttccatgggccgccgttccagatccattgggcggcttggataatatctgcggtggtgtaagtccggttcactggtcaccccctgaacaggttgtcgaggttgtctgggttactggtgttggtggtgtcgaatcgtcccacacagtggcagtagtcgtacatgagtttgataatgtgttggtggtcgccgaggtaggtgttgccactaatactgtaggtggctgtgccgtctttgccgataatgtatttggcggtgatggtttctggtgtttcggtgttggtgatgattgctgttgtggtggtgcctacggtttgtagcctggtggtttgggttccgtcgtcgagggtggtggtaaccataattggggttttccttaaatgcttgtctggttgtcggctagatgaataatatcggataaaggtttcggctggtctaggtgctgtaccgctttgttggctaaacgtttggctaccctgtaacacattttggtatagtgtttgttgtctaggttgtggtattgttcccgcaccgcaatatatagtagggagtcttggtacaggtcgtctgcactgattgcggggtagtgggtggctactttgatgcatgaccggttgagtgtgcgaagatgatggtcggtggtccatccccacgatgcggtggtggcccggtctgcttttgttggtcgtctactcatggcactatttcatctcgctatctggtagttgtttggtgttttatggttgatagtgtagcacacgagtccggggttgccggtggtgcccgtcttgtgccggtaccatgtggattcgccttccatggatgggcattggatgaaggtgcgttgtccttgctcggagatttctaggtggtgtcggtgcccggccatgaggatgtgggatgtggttccgttgtggaattcttgtccgcgccaccaatcatagtgtttgccggtgcgccattggtgtccgtgggcgtgcaggatttgtgtgcctgccacattgacggtggtggtcatttcgtctcggctggggaagtggaagtgtaggttggggtattggttgttgagttggtaggcttcggcgatggcgcggcagcagtccacgtcgaaggagtcgtcgtaggtggtgacgcctttgccgaagcgcacggcttcaccgtggttgccggggatggatgtgaccgttaggttggcgcagtggtcgaattggtggatgagttgcatcatggccatgcgggtgagccggatttgttcggtgaggggtgtttgtgtgcgccaggcgttgttgcctccttgtgacacgtatccttcgatcatgtcgccgaggaatgcgatgtggactcgttgcggtttgcctgcctgttgccagtagtgttttgcgactatgagggagtgcaaatagtcgtcggcgaagtgtgctgtttctcctccggggatgcctttgccgatttggaagtctcctgccccgatgacgaaggccgcagtgctgtagtcggtgcgggtgtcttgttcgggttttggtggctgccattcggctagtttatctacgagttcgtctacagggtaggggtttgttgcgggttggtggtcgatgattttttgtacggatcggccggtttctccgttcggtaaggtccattcggagatgcgtgtgcggcgtacagtaccattggctagattgtcgtcgatggtgtcgatggcgttgtcgtggttggctagctgtgtgagtagccggtctatattgtctatcactgggtatcctcttcctcgtgtggggtggtgttggcttgtttgcggcgatagtctttaataacggtggcggagatggggtatccggcttgggtgagctgttttgctagccatgaggcggggatggttttgtcggcgaggacgtctgcggctttgttgccgtagcgttggataagggtttcagttttggttgccatgatatcctaggggttgtgtggcgggttgccatcctgtgcggcagtcgccgtcgtgtcctggcttacgggtgcaccatgtgatggttccgtctgtgtggtggagttttttgccgcacatgacgttttgtagatgctccggcagctggtcggtgttgttgctggtttgtatgtcgaagagtgttttctggttggtgaaatgctctgacacggtgccattatgcacgggtagtatccatgttttccattgctgttgtagcctggtgttccagtggaattgtttggcggcgttttcggcctgttttaaggttttgtagtagccgactagtatgcgctggtgttcactgtcgggtgggttttggcctcgccaatattgtgccgccacggcgtagcggttgctggctgtgaaggcgtcccagcagtattcgataatgtgttgtagtgcactatcgggcatgtcttgtatttggttttcgttaagccattcttcaacaaggatgttgtgtatggcgcgtttgtctttgatggttggtttgaacgagatgctcacgatagtaccggctggtcgtcttgcatgaactggttgaaggtgttgtttccggcgtgttgggcttgtgtgatgtcctggtcggtccagtcggggtgttgctgtttcagatagtgccagtggcacgcattgtaggtttcgtcttgtagccgtgtgagatggttttcggtgatgatttgtttccacattgtccatgacacgtcgagccggttgaggatttcgagggctgggatgttaaattggttgaggaagagtatttcgtgggtgtagtagtttttctcgtaggcgtcccatccgcttcggtgcctgttgggctggtttttggggtaggcttcccggcatactttgtgcaaatgtttggccatgtcgtcgggtagtttaatgtcggggttggcgcggatcatggatcgcataccatcataggtggtgccccaggtgtgcataatgtaggtggggttttctccatcagcccatttttctgcacagatggcgaggcggatgcgcctcctggctgcttggctaatgttgcgccggttggggatggggcacgtgtctaggggatccatgatgttttagtgtacctttctttgttggggttgcttgtgtggttttattgtagcactgtgttgagtgcttgtgtcaaccctgttttgccggcctgaaggtaggtgtctgtgacatcccccagggtgaggggcacgtgtacggcttgggggagtgctgtttggagggtttgggccatcttgtctcccgcggggtcgggatcggaccagatgtaaacatggtcgtagccttcgaagaatttggtccaaaagttttgccacgaggttgcgccgggtatggcgacggccgaccatccgcattgttcgaggatcatggagtcgaattcgccttcgcaaatgtgcatttcggctgccgggttggccatggcggccatgttgtagatggagcccgtgtctccggccggggttaagtatttggggtggttgtgttctttgcagtcgtgtgggagtgagcagcggaaacgcatttttcttatttcggctggccgcccccaaacggggtacatgtaggggatggtgatgcactggttgtagtcttcgtggcctgggatggggtcattgtcgatgtatccaaggtggtggtagcgggctgtttcttcgctgatgcctcttgctgagagaaggtcgagaatgttttcgaggtgggtttcgtagagggccgaggctttctggattcggcggcgttccgcaatgttgtatgggcgtatgctgtcgtacattcgggtttctttcttcgagttgttgttgtagtttggcgaggccgcctccgacaccgcatgtgtggcagtaccagacgcccttgtcgaggttgatgctcatggagggttggtggtcgtcgtggaacgggcagaggatgtgttgctcgttcctggacgggttgtagcgtatccggtaggtgtcgaggaggcggcaggtgtcagaggtgtgggaggagttctgcgagggttgataccacataggcttcgctccatggcttgttgcgctgtttcatgaccactaacccgattgtggatttgtcaaccaggttgcggtgggtttcatagttgcgcgcctcccggctggcttgtttcacgaattgggcgagatgttgctgtcctgctttcgcttcgatcacataggttttgtggccggttgtgaggatgaggtcgccttcgtcttcgtggccgttgaggtgtagccgttcgatgtcgtgtccgatgtcacgtagctggtgcaataatcgtgtttcccactcggcaccggcccggcggttgcgtgattgctgtgtagccatcataatcctttgtgtgttgtggccatgttccatggctgtttttcggctagtggtccgaagaatgtgtattcggggtaggctcgtagccgttcgtatcgggtgccgtctgggctggatttgcctgtgcgctgtttcaacactgcgatgcgcgcctctgccggtatcgatagcccgttgccgttatcctcgccaccatacaatgagactccgaggatgagttgtggtttctcggatagcccgtttttgatctctcgtctggcgggcgggtgttcgatgtcggagccggttttgtcggttgcgtggtgtgtgacgataatggtggagccagtatccctacctaatgctgtgatccattgcatggcttcttgctgtgcctggtagtcactctcgcagtcttggatgtccatcaggttgtcgataacaatgagtggtgggaaggtgttccacatttccatgtaggcttgcagctccatggtgatgtctgtccatgtgatgggtgactggaatgagaatgtgatgtgttggccgtggtggatgctgcctcgatagtattctggcccgtagtcgtcgatgttgtgttgtatttgggcggttgtgtgttgggtgttgagggatatgattcgtgtggaggcctcccagggtgtcatgtcccctgaaatatatagggcgggctggttgagcatcgcggtgatgaacattgctagcccggatttttggctgccggaccgccccgcaatcatgacgagatcccctttgtggatgtgcatgtcttggttgcggtagaggggttctagttgtggtatacggggcagctcagcagcggtttgggaggctctctcgaaggatcgttgtagagagagcatcgggaccttaatctatctatctgttacggtttggatgaatattggcggtcagatggagtcgatatctacatcatcgctgccggtggtgttgggctggctgtctcgctggtcaacgtaggcggctacaaggtcgtagatggcgtcgtctaggggtttgaggatgacagcgttgaacccgtttttagtgcgcactgtggcgagtttgaaggcctgctcctcgccgaggtaggtttcgagttcgcggatcatggagtgtgggcggtcgttgttgcctcgcgctttttcgatgatagcgttggggatggtttctggggtgccgttgttgaggtcgtcgagggtgtggaagatagtaacgtcggcgtaaatacggtctgcgacctgtccgccgtagccttcggtgttgtgttccacgtcgtggattttgaaggcgatggcggtggcgtcctggtttttggacgggttgaagaaggtgctgctgttgctgttgttgcggtagttggcgagtcccataacttttgtccttttgctgtttgtgttgttttgttgtcttatattggtttatcgggtgaggctgtttcgtttagtgcggaacgcctcagacacgtcactgttactggtgatgatctttttgtactgtttcaagaggtctgctaattgtgctttactggtggctttgttgatcctgtcgatgataatgtcgttttcttgattggcgattttgttgacgtagtctttggctgctttgtcgtatcggtcttggaggatgatggatgcgctcgctacgagcgttgccagatcccagtctttggagactgtttcgtctttgagtccgcctagcaggtcgatgatggcctgttttgtctgctctgctgtgtctcctcggatgaccgcccatggtgcagcatagtctccaccatatttgagtgtgatagtgagtcgatcattgtctgtggtgcgctcttctgtcacttgttttccttttctttattgtctgcttggggtggctgtacggtggattctaccgggtatctgtaggcgtctttcccgtctaccgcccagcaggcgtcctgtacggggcatcctttacagagtgctgtaacatgtgggacgaagatgcctttgctgattcctttcattgcttgactgtacatggatgatacatgccggtaggtattgttgtcaagatcgtacagttcggttgctgtgccctgagtttgcgatgtggtgttgtttcggctgctggcgggtgtccaaaacatgcctttcgtcacgttgatgtcgtgttggttgagcatgtaccggtaggtgtgcaactgcatggcatcaacagggaggcgacccgttttgaggtcgagaataaacgtctcaccagtgtcggtgtcggtgaagatacggtcgatgtagccaacaatctttgtgccgtcctggagggtggtttcgactgggtattcgatgcctggctggccgtcgagtattgctgtgtggtattgtggatagtttgtgcgccactgtttccacctgtcgacgaagatggggccatagatcatccaccagtcgtagtctttcttgtgtggcccgcctgactcgcacatgtttttgcacactctgccggagggtttgatttctgtgccttcggattcgacgagggcaacttgggtgtcgaaaacgtttttgaaggatgagagtttgtctggcagtgcagggtattcgtcggggttgtacaggtggaggtcgtactgttcggtgatgtggtgtatggcgcttccggcgatggttgcgtaccaggtgtggtgctgtgcatgatagccgtgggataggcgccatttttctccgcattcggcccactgggtgagtgaactgtaggagatgtggcctggatggttgatggttttcggatattgtgctagaggcattacttgtcgcttttgttccatgggttgcgggtgtcttggccggcattgtgttgctggtaggcgaggagtgctaggcagtgccaggctgcgtgtgccaggtgtggcaggtgtgattcatcgtcgaggttgtttccttgctgccaggatagcacatggcggtagagggcgtcgacactgtgacaccaggggtatcctccggtccagttgttgtcgccgtatttggtggcaccgtagcctgctacttcgcctagggcgtgcaaggctacggggtcaatgagggagagcctgcagagtttgagttcttttcgggcacctgtgtcggggtcggtgtacatgcgggtgggctcatccatggggggtgtgtgcctttcttggtttgggttactggttgttgtcgtgggctagtgctactgcgagaataatgatggcgagggtttcagcaataagtatgggtgttgtgatcatttgctgtctcggggattgttggtgagggttgaggcacccaggagggtggcgagggcgcatgcggcgataatggcgagggctgccttgtggggggtgccggttgcgtacatccatgtgatgatgccgccttggatccatgccagtgtggtgaagaaggtttcgtaactgtgcaactcgatactgttgggtgtgttcatgctcgctcctgaagaatggtgttgatggttttgtaaatgttgtacaggtcggtttcgatagataacagttggtggatttggtggtcgaggttgatatctgggttgagggtgttgatgcgggatgcgatgtcggtggctgtgcgtagtgtgccgccggtgtggtgaataatgtgtgcggtgtcggcgagtccggtggtgacagcatagtgggagaggagaggcatagcggggatgctccttggcgggttactgttgcgggttgatgttgaggtcggtgacgtgcgggtggtcttctgttcctgtgatgaggcagtggacggtgactgggagtttggatgcgccgggctgtttcatggttgcgccgtagacgatgctgaacgtgtctttaccgatggttttgtggagttggaggtcgatgtcggggttgccgttccagttgacgccgtgtgcggcggccttctgttcggctttacggttgcaggtgtgtgctgcggtgatcatggtgagaccctgcgcggtttcttcaccccttgcttgggcttgcttgtgggttttggcttgttcggcttgtagggagcgggtggcggctgcctgccgtgccgctttctcggctttgcgctgttgggcggtttttggtgtccattctgtgttggctgtggttacctgtggtgcgggttgtgatgcgagtggggggttgtcgtcgggggctgggaggaaggatgcggcggcgatgatggcggctgtgattccggcgatggtgtagccgtttttcttgttcatgactgttatcccctttccggggtgttgttcgttgctgacatgattgatacttccagacggggctatgactgtcaaggtgtcgctcagtttgtgtgagcgatccttgtgtggctgggggttatcgggcgaacagggtgagtaggtgtcctaagttgatgcgactcacgttccagtagagttgcgtggcttcaccgccagtgagcggcttccacttgttgtggctgaacactgtaccgtcggatgctatgaacgtgtcggggcgtagcttgtgaagttcagtctctacgctctgccggtaggcttcggcgaggccctcaaaatccatgtggtcaccggagaggttttcgaggcgtgtcaggtcgaagggtgtggggcagtcgtagctggcgggggtgtagagctgggtgaagtggtcggcgatcttttgcatcatgattccttttctagtgtggtgggttaatagttttatcgggtggatgcgacaaggatggcgtctatgtcgatcatgtcgatgagatcgtggagttcctcggcctcattctcagataggtggcgccagtcgtagtcgccgtacacggcgccgtcgagggtgacagtccacaggggccggatgagccgtatggcttcttgtactttggcgtggtacatgcggcgcaccatatccagatcgatgtcgtctgaatggtttccggtgaggctgtggagactgagggggtcgatttctgtctgctggtagaggctggtgaaggatggggtgatgagtgtgccatccatgggggggtgctcctttctggattgtttgggttggttgttgtggtttctaggatgtgtaggttgcgacccacagtcaaggctgcgctcaatccgaatgagcgtttagcgtgtgtggcatgggatgtggcgtatctcacttaagccttccttgcctctctaggcgtctcaaatcttctgggggtaggattatatagggttgaccctgctgatcgattctagagcacttctagggcctctcgggggtatgtctgagtgatgacgggtgtggcagatgatctagcgagtcaaggtgccgagcttagacataaaatctatcatctaggtgtgtgagatgtatcacatcctcctggcttggtgtgcactttcaaggctactctgtcgatctgacgtggagggtgtagcccagaaataccgtttaaagccactgggagacgcctagaagcgccttacggggtgggggctaggtatttatacccccagcatattctgatcgattctagacgcctacagaagcctggtacacgatcagctatccagacgcagaccatcagcccctatcccgcttagctaagcctgcactatgtggacattgttggatactgtagaggaaagaaggacacggtaaaggaaagagggggaatcagtcttagggtcttaggtacttcagttcaccttaggggcttagcgctgagcacttagcgctaagcccctcaagggctcggcatcagcctgacaggcttagcccatactgcacagccctgaaaggagtacacgccatcagggaaggcttgagagtacgaggagcctcagcgacgagtactcgaaagcctgagggaacacctttagcactgatgggcctagcgcgttcggaaagaacacagaagtaaagtgtgacagctgtccgggagtgaaccccgttctggctaggggtttcagtcttaactacctgtaaaggttacaagactctaagaaaatttaagaaaattcttaagaagaaagttgtgttgttatcccccaaaaaacacccgtttacacccctcaaacccgcctatagagccaaatccgccagtttgactcgtcccaggtggcgtatgctaggctggacaggtagccagctggacgcgaggccagaaagtgctgacgcacttcccgacctcgcttaccatcagtctaccaaacactttaaagcttcaaggctaagccactcagtgctaagcccttaagacctcaacgcttagcaccgagcccttgaggggctcagcattagcactaaggcttaaacacttaataatttaagtaaacataaaagcttttaagacttaaagtaaatatataaccttaacagttaaacgtttaaagctttaaaccttaacacctaagttaggtataaaaccttaaaggcttagcacttaaggatataaacttaacatcagtgtttaagactttaaaacttaaagtaactataagacttaaagacttataagctttaatacttatataataataaagtttaagactgatggttaactttaagtgtttaaagtcttatagttactttaagttttaaagcttataagttataaaagttttagaagagctaaggggttaacttctttacttctctactctctttggttctttctctcttctcttcttttcttcatcaggggagaagaggaacctttaccatcagcgctgatgggctttcacggtgtgtctcgtgtgtctctggtcgcaagctcccatcgcaccctcgccacccctcaccttgaccgtgtctcctttacagcttggtgtgttcggctgaaggcgtacggcgtgtcacgctaacacccttaacaccaggtaagacttaaagtgtatattatatgtagaagactttaaaaactttgaggatgtacacgttttggctgtgacctacaccgctaggcgctaggccttgaaacgcgaacacaccctcccccatttttcttccgtgtccttcttcttttgacacagctggggggcgatgtgatctttctcacatgcaggggtggagggtagaaaacaaccaccccaccacaaacagaacaccccaccaaacgaacaaaacagggcctagaatcgaccagcagggcaagggcaaggtattcatacccccaacgcatttcaggctgttacagaggcaatcagaggcttacagggaccataggtgaacgggaggcgcgatggcacacaccaaccgcaccgcatccgccgcccaccggcgctggcggcaacgactcatcacccaagcccgacaacaaggccaaaccgaatgtcccttgtgtggagccaccatcacctgggacacacacgacctaccaaccagccccgaagccgaccacatcacacctgtcagcaggggaggactcaacaccctcgacaacggccaaatcatctgcagaacatgcaacagaagcaaaggcaacagaacacaaccaaacattcgattccaacaacaaaccacaaaaacattgattccatggtgacaaaccccacaacccccaccggggacaccccctgcacacccgtgcaagacc

SEQ ID NO: 44 - DNA, 29451 bp, unidentified
  source 1..29451: mol_type = unassigned DNA; note = Bacteriophage of P. acnes
agtgaaatacctcccttttgtggatttatctgtttgtcgactttttgtgttggtggtgagtgttgtgcagcctgagcttcctgggtctcgtgattggtgtggggagacgcttcgctggtggcgtgtgtggggtgaggatagtcgcgcatcgtacgtgtcggatgaggagtggctgtttctcatggatgctgcggtgattcatgattgtgtgtggcgtgagggccgggctgaccttgtggcttcgcttcgtgctcatgtgaaggcttttatgggcatgttggatcgttattcggttgatgtggcgtctggtggccgtggtgggggttctgcggtggcgatgattgaccggtatcggaagcgcaagggggcctgattaggtgtctggtgttgttgggtctcaggtgcctcgtcaccgtgtggctgcggcgtattcggtgactgccggcggggatgctggggaattgggtcgtgcgtatgggttgatgcctgatccgtggcagcagcaggtgttggatgattggcttgctgtcggtggtaatggcaggcttgcttctggtgtgtgtggggtgtttgttccgcggcagaatggcaagaatgctattttggagattgtggagttgtttaaggcgactattcagggtcgccgtattttgcatacggctcacgagttgaagtcggctcgtaaggcgtttatgcgtttgaggtcgttttttgagaatgagcggcagtttcctgacttgtatcgtatggtgaagtcgattcgtgcgacgaatggtcaggaggctattgtgttgcatcatccggattgtgccacgtttgagcgtaagtgtggctgtccgggttggggttcggttgagtttgtggcccgttctcgtggttctgctcgcgggtttacggttgatgatttggtgtgtgatgaggctcaggagttgtcggatgagcagttggaggctttgcttcctaccgtgagcgctgcaccgtctggtgatcctcagcagattttccttggtaccccgccggggcctttggctgacggtagcgtggtgttgcgtcttcgcgggcaggctttgtcgggtggtaaaaggattgcgtggacggagttttcgattcctgacgagacggttccggatgatctatcgaggtcgtggcggaagttggctggggatacgaatcctgcgctgggtcgccgcctgaatttcgggacggtgagcgatgagcatgagtcgatgtcggctgccgggtttgctcgggagaggcttggctggtgggatcgtggccagtcggctacgtctgtgataccggccgataagtgggctcagtctgctgtggatgaggcgagtctggttggcgggaaagtgtttggtatctctttttcgcgatcaggcaatagggttgctttggctggtgccggcaggactgatgctggtgttcatgttgaggttattgatggcctgtcggggacgattgtggatggtgtaggccagctggctgactggttggcgttgcgttggggtgacacggaaaagatcatggttgccggttcgggtgctgtgttgttgcagaaggctttgactgatcgtggtgttccgggtcggggtgttgtggttgccgatactggggtgtatgtggaggcgtgtcaagcctttctggaaggcgtaaggtctgggagtgtttctcatcctcgtgctgattctcgccgtgacatgttggatattgctgtaaggtcggcggttcagaaacataaaggctctgcgtggggttggggttccacatttaaggacggttctgaggttcctttggaggctgtgtcgctggcgtattttggtgcgaaaacagttaaagcgaagcggcgtgagcgtagtggtaggaagcgggtgtctgtggtatgaactcggatgagttggctctgattgagggcatgtttgatcgtattaagagtttgtcttcgtggcattgtcgcattgagggctactatgagggttctagccgggtgcgtgatttgggggtagctattcccccggagttgcagcgtgtgcagactgtggtgtcgtggcctgggattgcggtggatgctttggaggagcgtctggattggctgggctggactaatggtgacggctacggcctggatggtgtgtatgctgcgaatcggcttgctacggcgtcgtgtgatgtgcatttggatgcgctgatttttggtttgtcgtttgtggctatcattcctcatggtgatggttcggtgtcggttcgtccgcagtcaccaaagaattgtactggccggttttctgccgatgggtctcgtctggatgctggccttgtggtgcagcagacgtgtgatcctgaggttgttgaggcggagttgttgcttcctgatgtgattgttcaggttgagcggcggggttcgcgtgaatgggttgaggtggatcgtataccgaatgtgttgggtgctgttccgcttgtgcctattgtgaatcgtcgccgtacttctaggattgatggccgttcggagattacgaggtctattagggcttacacggatgaggctgtgcgcacactgttggggcagtctgtgaatcgtgatttttatgcgtatcctcagcgttgggtgactggcgtgagcgcggatgagttttcgcagcctggctgggtcctgtcgatggcttctgtgtgggctgtcgataaggatgatgatggggacactccgaatgtggggtcgtttcctgtcaattcgcctacaccgtattcggatcagatgagactgttggcgcagttgacggctggtgaggcggctgttccggaacgctatttcgggtttatcacgtctaacccgcctagtggggaggctttggcggccgaggaatctcggcttgtgaagcgtgctgagcggcgccaaacgtcgtttggtcagggctggctgtcggttggtttcctggctgccaagtcgcttgattcttccgttaacgaagctgatttttttggtgatgttggtttgcgttggcgtgatgcatcaacacctactcgggcggctacagcggatgctgtgacgaagctggttggtgccggtattttgcctgctgattctcgcacggtgttggagatgctggggcttgatgatgtgcaggttgaggctgtgatgcggcatcgcgccgaatctgcggatccgttggctgcgcttgctggggctatttcccgtcaaacgaacgaggtttgatggatggcttcgggtgctatgtcgaggctggctgcgactgagtatcagcgtgaggcggtcaggtttgctgggaagtatgcgggctattattctgagcttggccgtttgtggcgtgccggcaggatgagtgacacacagtatgttcgtttgtgtgtggagttggagcgtgccggccatgatggttcggcgtcgttggccgccaggtttgtgtcggattttcggaagcttaacggtgtcgatcctggtttgattgtgtatgacgagtttgatgctgccgcggctttggctaggtcgttttcgactatgaagattatgaatagtgacccggatcgggcgaatgatacgattgatgcgatggcggcgggttttgatcgggctgtcatgaatgctggtcgtgacacggttgagtggtctgcgggtgcgcagggtaggtcgtggcgtcgtgtcacggatggggatccgtgtgctttttgtgccatgttggctacgaggtcggattatacgactaaggaaagggcgctcactactggtcatacgcggcgtcataagcgtggtggtaagcgtccgtttggttcgaagtatcatgatcattgtgggtgtacggtggttgaggttgttggcccttgggaaccgaatagggctgatgccgagtatcagaggacgtatgagaaggctcgcgagtgggttgatgatcatgggttgcagcagtcgcctggcaatattttgaaggctatgcgtactgttggtggcatgagataatttgatgtggtttccggttgtgcgccgccggttatcggtgcacagggttgtctcccgcacgggggtcaacaatgttgtgttgttttccgcaaggagtgtagggttaggctatggccgatcagagtgttgaggaacagaatgttgacaatgatgttgtggagtccggaaagggtgacggcattgttgacacggtgaagggcgatcaaggcaaacaggttgaagatcagtcgaagaatgaaggcgagggtaaatcgccggggactgattggaaggctgaggctcgtaaatgggagtctcgtgcgaaaagtaatttttccgagctggagaagcttcgtacatcgagtgacgattctggatctactattgatgagcttcgccgcaagaatgaggaactcgaagacaggatcaacgggtttgttcttgagggtgtgaagcgtgatgtggctgccgagtgtggcctttcgggtgatgctgtcgcttttctgcacggcgacgatcgtgaagcgctggtggagtctgctaaggctttgaagggtttgatcgaccatagtagtggtggcgcgggtgtgcgccgtcttgcggggagtgcccccgttgatgatgttaaacgacgtgagggtgtcgcgtttgtggatgctcttgtcaataattctaggagatgatttgtgatggctgacgattttctttctgcagggaagcttgagcttcctggttctatgattggtgcggttcgtgaccgtgctatcgattctggtgttttggcgaagctgtcgccggagcagccgactatttttggccctgtgaagggtgccgtgtttagtggtgttcctcgcgctaagattgttggtgagggtgaggttaagccttccgcgtctgttgatgtttcggcgtttactgcgcagcctatcaaggttgtgactcagcagcgtgtttcggacgagtttatgtgggctgatgctgattaccgtctgggtgttttgcaggatctgatttccccggctcttggtgcttcgattggtcgcgctgttgatctgattgctttccatggtattgatccggctacgggtaagcctgctgcggctgtgaagacttcgctggataagacgaagcatgttgttgatgccacggattctgccacgactgatctggtcaaggcggtcggcctgattgctggtgctggtttgcaggttcctaacggtgtcgccctggatccggcgttctcgtttgctctgtcgactgaggtgtatccgaaggggtctccgcttgccggtcagccgatgtatcctgccgccgggttcgctggtttggataattggcgcggcctgaatgttggtgcttcttcgactgtttcgggtgccccggagatgtcgcctgcctctggtgtgaaggctattgttggtgatttctctcgtgtccattgggggttccagcgtaacttcccgatcgagctgatcgagtatggtgacccggatcagactggccgcgaccttaagggccacaatgaggttatggttcgcgccgaggctgtcctgtatgtggctatcgagtcgcttgactcgtttgctgttgtgaaggagaaggcttccccgaagcctaatccgccggccgagaactgatttatttgttgcgataatgttcatgctgtgtgcagggggtggtgttgatgggtatcattttgaggcctgaggatattgagcctttcgccgatattcctaaagataagcttgaggcgatgattgccgatgtggaggctgttgctgtcagtgtcgccccctgtatcgctaaaccggatttcaaatacaaggatgctgctaaggctatcctacgtagggctttgctgcgctggaatgatactggtgtttctgggcaggttcagtatgagtctgcgggcccgtttgctcagactacacggtctagtactcccacgaacttgttgtggccttccgagattgccgcgttgaagaagctgtgtgagggtgatggtggggctggtaaagcgttcactatcacaccgaccatgaggagtagtgtgaatcattctgaggtgtgttccacggtgtggggtgagggttgctcgtgcgggtcgaatattaacggctacgctggccctttgtgggagatatgatatgaccagttttccttacggtgaaacggttgtgatgcttcagccgactgttcgtgtcgatgatttgggcgacaaggttgaggattggggtcatcctgtagaaaccgtgtaccataacgtggctatctatgcttccgtttcgcaggaggatgaggccgcggggcgtgattctgattatgagcattggtcgatgcttttcaagcagcctgttgtgggcgctgattatcgttgtaggtggcgtattcggggtgtggtgtgggaggctgacgggtctcctattgtgtggcatcacccaatgtctggctgggatgctggtacgcaggttaatgtgaagcgtaagaagggctgatggttgtggcacgtgatgtgaatgtgaagcttaatcttcctggtatccgtgaggtgttgaagtcttctggggtgcagggcatgttggcggagcgtggcgagcgtgtcaagcatgcggcctctgctaatgttggcggtaatgcttttgatagggcccagtatcgtgccgggttgtcgtcggaggtgcaggttcaccgtgttgaggctgtcgctaggattggcaccacctataagggtggtaagcgtattgaggcgaagcatggcacgttggctaggtcgattggggctgcgtcgtgatcgtttacggtgatccgcgaatatgggcgaaacgcgtgctcaaggatgatggctggctgtccgatataccgtgtacaggtactgtcccggatgatttcacgggtgacttgatttggttggcgttggatggtggcccgcagttgcatgttcgtgagcgtgtttttttgcgggtgaatgtgttttctgatatgccggatcgtgctatgtctttggcgcgtcgtgttgaggctgtgctggctgatggtgttgatggtgatccggtggtgttttgtaggcgttctactggtcctgatttgttggttgatggtgcacgttttgatgtgtattcgctgtttgagctggtgtgccgtcctgtcgaatccgagtaaacgtatttgttttctatattttgtttttgtttgattatttttgggggttgtgatggctgctacacgtaaagcgtctaatgttcgctctgctgttacgggtgacgtctatattggtaaagctcatgccggtgacactattgatggtgtgaagacggttcctgacggtcttaccgctttagggtatctgtctgatgacgggtttaagattaagccggagcgtaaaacggatgatttgaaggcttggcagaatgcggatgttgttcgcactgtggctacggagtcgtctatcgagatttctttccagctgatcgagtctaagaaggaggttatcgaactgttttggcagtcgaaggttactgccggagccgattcgggttcgttcgatatttctcctggtgccacgacgggtgttcatgccctgttgatggatattattgatggcgatcaggttattcgctactatttccctgaggttgagttgattgatcgtgacgagattaagggtaagaatggcgaggtgtacgggtatggtgtgacgttgaaggcgtatcctgcccagattaataagaatggtgatgcggtgtcgggtcgggggtggatgacggctttaaaagctgatactcctccgactcctcctccggccccgaagcctccgaagcctgagccggatccgaatccgccgtctaataactgatacacatagtttgagggattgttgatagatgagtgacacaggttacacgttgaagattggtgaccgtagctgggtgttggcggatgcggaggaaacggcgcaggctgttcctgcccgcgttttccgtcgtgccgccaggattgcccagtcgggggagtctgcggatttcgcccaggttgaggtgatgttttctatgttggaggctgccgccccagaggatgctgtggaggccttggaggggcttcctatggttcgtgtggccgagattttccgccagtggatggaatataagcctgaaggtaagggtgcctcgctgggggaatagtttggctccacggcctgattgatgattatcgtggggccatcgaatacgatttccgcactaaatttggtgtttctgtttatagtgttggtggcccgcagatgtgttggggtgaggctgtccggctggctggcgtgttgtgtaccgatacgtctagccagttggcggcccacctgaatggttggcagcgcccgtttgagtggtgtgagtgggctgtgctggacatgttggatcattacaggtctgctaatagtgaggggcagccggagcctgtggcgaggcctacggatgagcgtagggcccggtttacgtctgggcaggtggacgatattttggcgcgtgttcgtgccggcggcggggtgtctcgcgagattaatattatggggtgaatagtgtatgtctggtgagattgcttccgcatatgtgtcgttgtatacgaagatgcctggccttaaaagtgatgttggtaaacagctttctggggttatgcctgctgagggtcagcgttcgggtagtctttttgctaagggcatgaagttggctcttggtggcgccgcaatggtgggtgctatcaatgttgctaagaagggcctcaagtcgatttatgatgtgactattggtggcggtatagctagggcgatggctatcgatgaggctcaggctaaactgactggtttgggtcatacgtcttctgacacgtcttcgattatgaattcggctattgaggctgtgactggtacgtcgtatgcgttgggtgatgcggcttctactgctgccgcgttgtctgcttcgggtgtgcagtctggcgggcagatgacggatgtgttgaagactatcgccgatgtgtcttatatttcgggtaagtcgtttcaggatacgggcgctatttttacgtctgtgatggctcgcggtaagttgcagggcgatgacatgttgcagcttacgatggcgggtgttcctgtgctgtctttgcttgccaggcagacgggtaaaacctcggctgaggtgtcgcagatggtgtcgaaggggcagattgattttaacacgtttgcggctgcgatgaagcttggcatgggtggtgctgcgcaggcgtctggtaagacgtttgagggcgctatgaagaatgttaagggcgccttgggctatcttggtgctacggctatggccccgtttcttaacgggttgaggcagatttttgttgcgttgaatccggttattaagtcggtcacggattcggtgaagccgatgtttgctgccgtcgatgctggtattcagcgtatgatgccgtctattttggcgtggattaatcgtatgccgggcatgattacgagaatgaatgcacagatgcgcgccaaggtggagcagctgaagagcgtttttgcgagaatgcatttgcctgtcccgaaggtgaatttgggtgccatgtttgcgggtggcacagcagtgtttggtgttgtggctgcgggtgtggggaagcttgttgcagggtttgccccgttggcggtgtcgttgaagaatcttctgccgtcgtttggtgctttgaagggtgccgctggcgggcttggcggcgtgtttcgcgccctgggcggccctgtcggtattgtgatcggcttgtttgctgccatgtttgcgacgaacgcccagttccgtgccgcggtgatgcagcttgtggctgtggtgggccaggctttggggcagattatggccgctattcagcccttgtttggtttagtggccggtgttgtggcacagttggcgccagtgttcggccagattatcggtatggttgccggtttggctgcccagattgtgcctttgattagtatgcttgtcgcccggctggttcctgtgattacgcagattattggtgcggtgactcaggttgctgcaatgttgttgccggcgttgatgccggtgcttcaggcggttgtggctgtgatacggcaggttgttggtgttgtgatgcagcttgtgcctgtgttgatgcctgtgattcaacagattttgggtgctgtgatgtctgtgttgccgccgattattggtttgatacggtcgctgataccggtcatcatgtctgttatgcgcgtagtggtgcaggttgtttcggttgtgttgcaggtggttgcccgtattattccggttgtgatgccgattgttacggctgtgatcgggtttgttgcacgtattttgggtgctattgtgtcggctgccgccaggattattggggctgttgcccgtgttgtcggatgggttgtgggccatttcgtgtcgggtttggcgcgtatgggttcggttattcaggctggctggaatcatattagggcttttacgtctgcgtttattaacggtttcaagtcgatcatttctggcggcgtgaacgcggttgtcgggttttttacgcggcttggtttgtcggttgcctcccatgtgaggtctggttttaacgcggcacgtggtgctgtttcttctgcgatgaatgctatccgtagtgtggtgtcttcggtggcgtctgctgttggcgggtttttcgggtcgatggcgtctagggttcggaatggtgctgtgcgcgggtttaacggggcacggagtgcggcctcttctgctatgcatgctatggggtctgccgtgtctaacggtgtgcatagtgtactgggttttttccggaatctgcctggcaatattcggcatgctctcggcaatatggggtccctgttggtgtctgctggccgtgacgtggtgtctggtttgggtaatggtattcggaatgctttgagtggcctgctggatactgtgcgtaatatgggttcccaggtggctaacgctgcgaagtctgtgttgggtattcattccccgtcgagggtgtttcgtgatcaggttggccgtcaggttgttgccggtttggctgaggggatcaccgggaatgctggtttggcgttggatgcgatgtcgggtgttgcttcgcagcttccggatgctgtggatgcccggtttggtgtgcgatcgtctgtgggctcgtttaccccgtacgaccggtatcggcgtgctcagggtgagagtgttgtggtgaatgtgaatggcccgacgtatggtgatcctgccgagtttgcgaagcggattgagcgtcagcagcgtgacgctttgaacgcgttggcttatatgtgagtaaaggggtatgcatgtttattcctgacccgtctgatcgttctggtttgactgtgacatggtctatggatccgcggtttggtgatgagcgtgtgcttcatttgacggattatacggggtcgtctccggtgatgttgttgaatgattcgttgcgcggtttgggtgttcctgaggttgagcatttttctcaaactcatgttggggtgcacgggtcggagtggcgcgggtttaatgtgaagcctcgcgaggtgacgttgccggtgttggtgtcgggtgttgacccggatccggtgggcgggtttcgtgacggttttttgaaagcctatgacgagttgtggtctgcgtttcctcctggcgaggagggggagctgtctgtgaagactcctgccggtgtagagcgtgtgttgaagtgccggtttgattcggtggatgacacgtttacggttgatccggttaatcgtggctatgcgcgttatgtgcttcatttgacggcctatgacccgttttggtatggggatgagcaaaagtttcgtttcagtaacgcaaagttgcaggattggttgggtggcggccctgtcggcaaaaacgggactgcttttccggtggtgttgacgcctggtgttggttcgggttgggataacctgtcgaataagggtgatgtgcctgcgtggcctgtgattcgcgttgaggggccgttggattcgtggtcggtgcagattgatggtttgcgtgtgtcttcggactatcctgtcgaggagtttgattggatcactattgatacggatcctcgtaagcagtctgcgttgttgaacgggtttgaggatgtgatggatcgcctggatgagtgggagtttgcgccgattccgcctggcggttctaagagtatgaatattgagatggttggtttgggtgccattgttgtgtcggtgcagtacaggtttttgagggcgtggtgaattgttgtggctggtcttgtcccgcagataacattgtttacgccagactatcatcgtgtggcgcctatcaatttttttgagtcgctaaaattgtcgttgaagtggaatggtttgtcgacgctggagttggtggtgtctggtgatcattcgaggcttgacgggttgacgaggccgggtgcacgcctggttgttgattatggtggtggccagattttttctgggcctgtgcgtaaagtgcacggggttgggcctcggcggtcttcccgtgtgactatcacttgtgaggatgatattcgcctgttgtggcgtatgttgatgtggcctgttaattatcgccccggtatggtgggttctgagtggcgtgcagaccgggattatgcccactattctggtgcagccgagtctattgctaagcaggtgttgggggataatgcttggcgttttccgcctggtttgttcatgatagaggatgagaagcgtggccgctatattaaggattttcaggtgcggtttcacgtgtttgcggacaagttgttgcctgtcctgtcgtgggctcggatgactgtttcggtgaaccagtttgagaatgcgaagacggatcagcgggggctggtgtttgattgtgttcctgctgtgacgcgtagccatgtgttgacgtccgagtcgggttcgattgtgtcgtgggagtatgtgagggatgcccccaaggctacgtcggtggttgttggtggccgcggcgagggtcgggatcggctgttttgtgaggatgttgattcgatggccgagggggactggtttgatcgtgtcgaggtgtttaaggatgcccgtaacactgattcggataaggtgtctctttacgatgaggcggagcaggtgttgtcggaatcacaggccacgtctggttttaagatcgagttggccgagtcggatgtgttgcgttttgggcccggcaatctgatgcctggggatttgatttatgttgatgtgggttcggggcctattgcggagattgttcggcagattgatgtggagtgtgattcgcctggtgacggctggacgaaggtgacaccggttgcgggggattatgaggataatccgtcggcgttgctagcgcggcgtgttgccggtttggctgccggtgtgcgggatttgcaaaagttttaaaaaagctcaacggattggggtttgttgtgggtattgtgtgcaagggttttgatggtgtgttgaccgagtatgattgggctcaaatgtctggtctgatgggtaatatgccgtcggtgaaaggtccggacgattttcgtgtcggcacgacgattcagggtgccacagtgttgtgtgaggttttgccggggcaagcgtgggctcacggggtgatgtgtacttcgaatagtgttgagacggtgacgggccagctgccgggtcctggcgagacgagatacgactatgttgttctgtcgcgggattgggagcagaatacggcccggttggagattgttcctggggggcgtgcggagcgtgccagtgacgtgttgcgtgccgagcctggcgtgtaccatcagcaactgttggctaccctggtgttgtcgtctaacgggttgcagcagcagctggataggcgtgccgtggcggctagggtggcgtttggggagtctgctgcgtgtgaccctacccctgtggagggtgaccgggtgatggttccttcgggggctgtgtgggctaaccatgctggcgagtggaggctgttgtctccgcgtatcgagacgggttcgaagtcgatcatgtttggtggatctaatgtgtatgcttacacgatcccgtttgatcgccagtttactagtccgcctgttgtggtggcgtctatggggaccgcggctgggggtacgacacagattgatgtgaaagcctacaatattactagtaaggattttggtttggcgtttatcacgaatgacgggtctaaaccgaatggtgtgcccgcggtggctaactggatagctgtgggcgtgtgacggtacaggcgttgtggtggctggtgtgatgttggggggctgccgtgtcgtggatgactcctgcattggtggcttctatttgtaccgcgttggccacggttttgggttctgttcaggctatcacatcccggtctagaaagcgtttgcgaaggttgtctgcgcaggtggatgctttggaagagtatacgtggggtgtgcggcgtgaggttcgccggtttaacgccaggcttcctgacggggttgatccgcttgtgttgcctgagccgcctggttatcggatgatgttgggggtgagtgatgagggagttggaggaggagaagcggcagcgtcgctcgtttgagagggcttccctgctgttgttgtttttgtcgcttgtgctgttgattgtggttgctgggggtgctttgcgtttcggggctgtatcctctgaacgggattctgagcaggcgagggcccagtcgaatggtacagcggccaggggtttagccagccgtgtgcggcaggtgtgtgcccatggtgggatggagtcggtacggcttcaccggtctggtttgtgtgtggatgctgtgcgtacggagcggagtgttcagggtgtgccgggcccggctggtgagcgcggcccgcaaggccctgcaggtgctgatgggcgtgacggtgttaatggttcgtctgggctggttggccctgttggtccgcagggttctcccggcttgaatggcgtgaaaggtcctgacgggttgcctggtgcaaatggatcggatggccgtgatggtgttccgggccgtgcaggtgttgacggcgctgatggtcgggatggttcggctggtgagcgcggtgatgtgggtccttcaggtcctgccggcccgcaaggtgcacagggggaacggggtgagcgtggccccgtcggtgcgaacggatccgatggtaaagatggtaaggatgggcgctcggtggtgtctgtgtactgttctgatggtctcctggttgtgaaatatagtgacggtgtggcttctacaatatcgggctcggtggcctgccagggtgtgaaaccgtcgcctatggtgactatatcatcccacaaatagaaaggagtggctgtgatggtagtgtttggtggtggtgtgtggtgaggtttatcccagcagcgcaccattctgccggttcgaatagtccggtgaatagggttgtgattcatgcgacgtgcccggatgtggggtttccgtccgcctcacgtagggggagggctgtttctacggcaaactattttgcttccccatcgtctgggggttctgcccattatgtgtgcgatattagtgagacggtgcaatgtctgtctgagtctacgattggttggcatgccccgcctaaccctcatagtttgggtatagagatttgcgcggatggtggctcgcacgcctcgttcagggtgccggggcatgcttacactcgtgagcagtggcttgaccctcgcgtgtggcccgcggtggagcgtgccgcgatcctgtgtagacgtttgtgtgacaaatataatgttccgaaaaggaagcttagtgcagccgatttgaaggctggcaggcggggtgtttgcggccacgtggatgttacggatgcgtggcatcagtcggatcatgacgatcctgggccgtggtttccgtgggacaaatttatggccgtagtctgcggcggtagtggtagtgaggagttaactgtggctgatgtgaaagccttgcatgatcagattaaacaattgtctgcccagcttactggttcggtgaataagctgcaccatgatgttggtgtggtacaggtacagaatggtgatttgggtaaacgtgttgatgccttgtcgtgggtgaagaatccggtgacggggaagttgtggcgcacgaaggatgctttgtggagtgtctggtattacgtgttggagtgtcgcagccgcattgacaggcttgagtctactgttaacggtttgaaaaagtgatggtggtttgttgtgggtaaacagttttggttaggtttactggagcgggccctgaaaacttttattcaaacgtttgttgccgtgctcggtgttactgcgggtgtcacgtatactgcggagtcgtttcgcggtttgccgtgggagtcggcgttgatcacagccacggttgctgcggtgttgtcggttgctacttcgtttggtaatccgacgtttgtggctggtaagccgaagactacggttgtggataccgggcttgttccacccgatgataccggtttgatagaaccgcatgcggtggatgtgtcggatcctggcatgattgagccgatggatgatgcggatgttgccggctatgtgccgaagcgggctgccgagtcggaggttggcacagtagagtctactgttgcataattgaatatgtgtgtgccccagcggtgctgccacgattgtgtggtggttgccgctggggcacactttttgtttatgcgatatggctatgattcgttgctgtcgatggtgtcttcgagcatctgatacaggtggaggcaggtgcagatggtttcgctggcctggtcgagaacgtttcggccgataacgtttttgtggttgtcgcggtggcggatgatagcccacatgatctcgtcggctgccgcctgtaatagttttgcctggtatgcgattccggcgagccagtctagtgcttcctggcttgcctgtgtgtcgtctggaataccacgggtgttgctgttgcttgggtgtccttcactgtcgcatagccacaggatttcgctgcactcgtctagcgtgtcctggtcgatagcgagatcgtcgaggctgacattgttgacggtaaggttcacgttgtcgagggagatgggtacaccgtactggttttcgacactgtcaacaatgttttgtagttgttgcatgttggtgggctgttgttggatgatacggtgtaccgctgctttgagggcagtgtaggggatattgtgtgtgttgttcatggttttatttcatccctgtgctgtcgtcgttatcgtctggatagtatctactgtttgcgtaccctgttagggtgatcaatgtttggtctgcccactgtttcacggtttgccgggttacccctaatcgttgggctgctaccgaataggtttgatcatacccgtatacttcccggaatgctgccaaccgtgctaggtgttttcgctgtttggatggctggcaggtgagggtgtagtcgtcgatggccagctggaggtcgatcatggagacgatgttgttgccgtgatgctggggggcggttggtgggggtggcataccgggttctactgatggtttccatgggccgccgttccagatccattgggcggcttggataatatctgcggtggtgtaagtccggttcactggtcaccccctgaacaggttgtcgaggttgtctgggttactggtgttggtggtgtcgaatcgtcccacacagtggcagtagtcgtacatgagtttgataatgtgttggtggtcgccgaggtaggtgttgccactaatactgtaggtggctgtgccgtctttgccgataatgtatttggcggtgatggtttctggtgtttcggtgttggtgatgattgctgttgtggtggtgcctacggtttgtagcctggtggtttgggttccgtcgtcgagggtggtggtaaccataattggggttttccttaaatgcttgtctggttgtcggctagatgaataatatcggataaaggtttcggctggtctaggtgctgtaccgctttgttggctaaacgtttggctaccctgtaacacattttggtatagtgtttgttgtctaggttgtggtattgttcccgcaccgcaatatatagtagggagtcttggtacaggtcgtctgcactgattgcggggtagtgggtggctactttgatgcatgaccggttgagtgtgcgaagatgatggtcggtggtccatccccacgatgcggtggtggcccggtctgcttttgttggtcgtctactcatggcactatttcatctcgctatctggtagttgtttggtgttttatggttgatagtgtagcacacgagtccggggttgccggtggtgcccgtcttgtgccggtaccatgtggattcgccttccatggatgggcattggatgaaggtgcgttgtccttgctcggagatttctaggtggtgtcggtgcccggccatgaggatgtgggatgtggttccgttgtggaattcttgtccgcgccaccaatcatagtgtttgccggtgcgccattggtgtccgtgggcgtgcaggatttgtgtgcctgccacattgacggtggtggtcatttcgtctcggctggggaagtggaagtgtaggttggggtattggttgttgagttggtaggcttcggcgatggcgcggcagcagtccacgtcgaaggagtcgtcgtaggtggtgacgcctttgccgaagcgcacggcttcaccgtggttgccggggatggatgtgaccgttaggttggcgcagtggtcgaattggtggatgagttgcatcatggccatgcgggtgagccggatttgttcggtgaggggtgtttgtgtgcgccaggcgttgttgcctccttgtgacacgtatccttcgatcatgtcgccgaggaatgcgatgtggactcgttgcggtttgcctgcctgttgccagtagtgttttgcgactatgagggagtgcaaatagtcgtcggcgaagtgtgctgtttctcctccggggatgcctttgccgatttggaagtctcctgccccgatgacgaaggccgcagtgctgtagtcggtgcgggtgtcttgttcgggttttggtggctgccattcggctagtttatctacgagttcgtctacagggtaggggtttgttgcgggttggtggtcgatgattttttgtacggatcggccggtttctccgttcggtaaggtccattcggagatgcgtgtgcggcgtacagtaccattggctagattgtcgtcgatggtgtcgatggcgttgtcgtggttggctagctgtgtgagtagccggtctatattgtctatcactgggtatcctcttcctcgtgtggggtggtgttggcttgtttgcggcgatagtctttaataacggtggcggagatggggtatccggcttgggtgagctgttttgctagccatgaggcggggatggttttgtcggcgaggacgtctgcggctttgttgccgtagcgttggataagggtttcagttttggttgccatgatatcctaggggttgtgtggcgggttgccatcctgtgcggcagtcgccgtcgtgtcctggcttacgggtgcaccatgtgatggttccgtctgtgtggtggagttttttgccgcacatgacgttttgtagatgctccggcagctggtcggtgttgttgctggtttgtatgtcgaagagtgttttctggttggtgaaatgctctgacacggtgccattatgcacgggtagtatccatgttttccattgctgttgtagcctggtgttccagtggaattgtttggcggcgttttcggcctgttttaaggttttgtagtagccgactagtatgcgctggtgttcactgtcgggtgggttttggcctcgccaatattgtgccgccacggcgtagcggttgctggctgtgaaggcgtcccagcagtattcgataatgtgttgtagtgcactatcgggcatgtcttgtatttggttttcgttaagccattcttcaacaaggatgttgtgtatggcgcgtttgtctttgatggttggtttgaacgagatgctcacgatagtaccggctggtcgtcttgcatgaactggttgaaggtgttgtttccggcgtgttgggcttgtgtgatgtcctggtcggtccagtcggggtgttgctgtttcagatagtgccagtggcacgcattgtaggtttcgtcttgtagccgtgtgagatggttttcggtgatgatttgtttccacattgtccatgacacgtcgagccggttgaggatttcgagggctgggatgttaaattggttgaggaagagtatttcgtgggtgtagtagtttttctcgtaggcgtcccatccgcttcggtgcctgttgggctggtttttggggtaggcttcccggcatactttgtgcaaatgtttggccatgtcgtcgggtagtttaatgtcggggttggcgcggatcatggatcgcataccatcataggtggtgccccaggtgtgcataatgtaggtggggttttctccatcagcccatttttctgcacagatggcgaggcggatgcgcctcctggctgcttggctaatgttgcgccggttggggatggggcacgtgtctaggggatccatgatgttttagtgtacctttctttgtttgggttgcttgtgtggttttattgtagcactgtgttgagtgcttgtgtcaaccctgttttgccggcctgaaggtaggtgtctgtgacatcccccagggtgaggggcacgtgtacggcttgggggagtgctgtttggagggtttgggccatcttgtctcccgcggggtcgggatcggaccagatgtaaacatggtcgtagccttcgaagaatttggtccaaaagttttgccacgaggttgcgccgggtatggcgacggccgaccatccgcattgttcgaggatcatggagtcgaattcgccttcgcaaatgtgcatttcggctgccgggttggccatggcggccatgttgtagatggagcccgtgtctccggccggggttaagtatttggggtggttgtgttctttgcagtcgtgtgggagtgagcagcggaaacgcatttttcttatttcggctggccgcccccaaacggggtacatgtaggggatggtgatgcactggttgtagtcttcgtggcctgggatggggtcattgtcgatgtatccaaggtggtggtagcgggctgtttcttcgctgatgcctcttgctgagagaaggtcgagaatgttttcgaggtgggtttcgtagagggccgaggctttctggattcggcggcgttccgcaatgttgtatgggcgtatgctgtcgtacattcgggtttctttcttcgagttgttgttgtagtttggcgaggccgcctccgacaccgcatgtgtggcagtaccagacgcccttgtcgaggttgatgctcatggagggttggtggtcgtcgtggaacgggcagaggatgtgttgctcgttcctggacgggttgtagcgtatccggtaggtgtcgaggaggcggcaggtgtcagaggtgtgggaggagttctgcgagggttgataccacataggcttcgctccatggcttgttgcgctgtttcatgaccactaacccgattgtggatttgtcaaccaggttgcggtgggtttcatagttgcgcgcctcccggctggcttgtttcacgaattgggcgagatgttgctgtcctgctttcgcttcgatcacataggttttgtggccggttgtgaggatgaggtcgccttcgtcttcgtggccgttgaggtgtagccgttcgatgtcgtgtccgatgtcacgtagctggtgcaataatcgtgtttcccactcggcaccggcccggcggttgcgtgattgctgtgtagccatcataatcctttgtgtgttgtggccatgttccatggctgtttttcggctagtggtccgaagaatgtgtattcggggtaggctcgtagccgttcgtatcgggtgccgtctgggctggatttgcctgtgcgctgtttcaacactgcgatgcgcgcctctgccggtatcgatagcccgttgccgttatcctcgccaccatacaatgagactccgaggatgagttgtggtttctcggatagcccgtttttgatctctcgtctggcgggcgggtgttcgatgtcggagccggttttgtcggttgcgtggtgtgtgacgataatggtggagccagtatccctacctaatgctgtgatccattgcatggcttcttgctgtgcctggtagtcactctcgcagtcttggatgtccatcaggttgtcgataacaatgagtggtgggaaggtgttccacatttccatgtaggcttgcagctccatggtgatgtctgtccatgtgatgggtgactggaatgagaatgtgatgtgttggccgtggtggatgctgcctcgatagtattctggcccgtagtcgtcgatgttgtgttgtatttgggcggttgtgtgttgggtgttgagggatatgattcgtgtggaggcctcccagggtgtcatgtcccctgaaatatatagggcgggctggttgagcatcgcggtgatgaacattgctagcccggatttttggctgccggaccgccccgcaatcatgacgagatcccctttgtggatgtgcatgtcttggttgcggtagaggggttctagttgtggtatacggggcagctcagcagcggtttgggaggctctctcgaaggatcgttgtagagagagcatcgggaccttaatctatctatctgttacggtttggatgaatattggcggtcagatggagtcgatatctacatcatcgctgccggtggtgttgggctggctgtctcgctggtcaacgtaggcggctacaaggtcgtagatggcgtcgtctaggggtttgaggatgacagcgttgaacccgtttttagtgcgcactgtggcgagtttgaaggcctgctcctcgccgaggtaggtttcgagttcgcggatcatggagtgtgggcggtcgttgttgcctcgcgctttttcgatgatagcgttggggatggtttctggggtgccgttgttgaggtcgtcgagggtgtggaagatagtaacgtcggcgtaaatacggtctgcgacctgtccgccgtagccttcggtgttgtgttccacgtcgtggattttgaaggcgatggcggtggcgtcctggtttttggacgggttgaagaaggtgctgctgttgctgttgttgcggtagttggcgagtcccataacttttgtccttttgctgtttgtgttgttttgttgtcttatattggtttatcgggtgaggctgtttcgtttagtgcggaacgcctcagacacgtcactgttactggtgatgatctttttgtactgtttcaagaggtctgctaattgtgctttactggtggctttgttgatcctgtcgatgataatgtcgttttcttgattggcgattttgttgacgtagtctttggctgctttgtcgtatcggtcttggaggatgatggatgcgctcgctacgagcgttgccagatcccagtctttggagactgtttcgtctttgagtccgcctagcaggtcgatgatggcctgttttgtctgctctgctgtgtctcctcggatgaccgcccatggtgcagcatagtctccaccatatttgagtgtgatagtgagtcgatcattgtctgtggtgcgctcttctgtcacttgttttccttttctttattgtctgcttggggtggctgtacggtggattctaccgggtatctgtaggcgtctttcccgtctaccgcccagcaggcgtcctgtacggggcatcctttacagagtgctgtaacatgtgggacgaagatgcctttgctgattcctttcattgcttgactgtacatggatgatacatgccggtaggtattgttgtcaagatcgtacagttcggttgctgtgccctgagtttgcgatgtggtgttgtttcggctgctggcgggtgtccaaaacatgcctttcgtcacgttgatgtcgtgttggttgagcatgtaccggtaggtgtgcaactgcatggcatcaacagggaggcgacccgttttgaggtcgagaataaacgtctcaccagtgtcggtgtcggtgaagatacggtcgatgtagccaacaatctttgtgccgtcctggagggtggtttcgactgggtattcgatgcctggctggccgtcgagtattgctgtgtggtattgtggatagtttgtgcgccactgtttccacctgtcgacgaagatggggccatagatcatccaccagtcgtagtctttcttgtgtggcccgcctgactcgcacatgtttttgcacactctgccggagggtttgatttctgtgccttcggattcgacgagggcaacttgggtgtcgaaaacgtttttgaaggatgagagtttgtctggcagtgcagggtattcgtcggggttgtacaggtggaggtcgtactgttcggtgatgtggtgtatggcgcttccggcgatggttgcgtaccaggtgtggtgttgtgcatgatagccgtgggataggcgccatttttctccgcattcggcccactgggtgagtgaactgtaggagatgtggcctggatggttgatggttttcggatattgtgctagaggcattacttgtcgcttttgttccatgggttgcgggtgtcttggccggcattgtgttgctggtaggcgaggagtgctaggcagtgccaggctgcgtgtgccaggtgtggcaggtgtgattcatcgtcgaggttgtttccttgctgccaggatagcacatggcggtagagggcgtcgacactgtgacaccaggggtatcctccggtccagttgttgtcgccgtatttggtggcaccgtagcctgctacttcgcctagggcgtgcaaggctacggggtcaatgagggagagcctgcagagtttgagttcttttcgggcacctgtgtcggggtcggtgtacatgcgggtgggctcatccatggggggtgtgtgcctttcttggtttgggttactggttgttgtcgtgggctagtgctactgcgagaataatgatggcgagggtttcagcaataagtatgggtgttgtgatcatttgctgtctcggggattgttggtgagggttgaggcacccaggagggtggcgagggcgcatgcggcgataatggcgagggctgccttgtggggggtgccggttgcgtacatccatgtgatgatgccgccttggatccatgccagtgtggtgaagaaggtttcgtaactgtgcaactcgatactgttgggtgtgttcatgctcgctcctgaagaatggtgttgatggttttgtaaatgttgtacaggtcggtttcgatagataacagttggtggatttggtggtcgaggttgatatctgggttgagggtgttgatgcgggatgcgatgtcggtggctgtgcgtagtgtgccgccggtgtggtgaataatgtgtgcggtgtcggcgagtccggtggtgacagcatagtgggagaggagaggcatagcggggatgctccttggcgggttactgttgcgggttgatgttgaggtcggtgacgtgcgggtggtcttctgttcctgtgatgaggcagtggacggtgactgggagtttggatgcgccgggctgtttcatggttgcgccgtagacgatgctgaacgtgtctttaccgatggttttgtggagttggaggtcgatgtcggggttgccgttccagttgacgccgtgtgcggcggccttctgttcggctttacggttgcaggtgtgtgctgcggtgatcatggtgagaccctgcgcggtttcttcaccccttgcttgggcttgcttgtgggttttggcttgttcggcttgtagggagcgggtggcggctgcctgccgtgccgctttctcggctttgcgctgttgggcggtttttggtgtccattctgtgttggctgtggttacctgtggtgcgggttgtgatgcgagtggggggttgtcgtcgggggctgggaggaaggatgcggcggcgatgatggcggctgtgattccggcgatggtgtagccgtttttcttgttcatgactgttatcccctttccggggtgttgttcgttgctgacatgattgatacttccagacggggctatgactgtcaaggtgtcgctcagtttgtgtgagcgatccttgtgtggctgggggttatcgggcgaacagggtgagtaggtgtcctaagttgatgcgactcacgttccagtagagttgcgtggcttcaccgcccgtgagcggcttccacttgttgtggctgaacactgtaccgtcggatgctatgaacgtgtcggggcgtagcttgtgaagttcagtctctacgctctgccggtaggcttcggcgaggccctcaaaatccatgtggtcaccggagaggttttcgaggcgtgtcaggtcgaagggtgtggggcagtcgtagctggcgggggtgtagagctgggtgaagtggtcggcgatcttttgcatcatgattccttttctagtgtggtgggttaatagttttatcgggtggatgcgacaaggatggcgtctatgtcgatcatgtcgatgagatcgtggagttcctcggcctcattctcagataggtggcgccagtcgtagtcgccgtacacggcgccgtcgagggtgacagtccacaggggccggatgagccgtatggcttcttgtactttggcgtggtacatgcggcgcaccatatccagatcgatgtcgtctgaatggtttccggtgaggctgtggagactgagggggtcgatttctgtctgctggtagaggctggtgaaggatggggtgatgagtgtgccatccatgggggggggtgctcctttctggattgtttgggttggttgttgtggtttctaggatgtgtaggttgcgacccacagtcaaggctgcgctcaatccgaatgagcgtttagcgtgtgtggcatgggatgtggcgtatctcacttaagccttccttgcctctctaggcgtctcaaatcttctgggggtaggattatatagggttgaccctgctgatcgattctagagcccttctagggcctctcgggggtatgtctgagtgatgacgggtgtggcagatgatctagcgagtcaaggtgccgagcttagacataaaatctatcatctaggtgtgtgagatgtatcacatcctcctggcttggtgtgcactttcaaggctactctgtcgatctgacgtggagggtgtagcccagaaataccgtttaaagccactgggagacgcctagaagcgccttacggggtgggggctaggtatttatacccccagcatattctgatcgattctagacgcctacagaagcctggtacacgatcagctatccagacgcagaccatcagcccctatcccgcttagctaagcctgcactatgtggacattgttggatactgtagaggaaagaaggacacggtaaaggaaagagggggaatcagtcttagggtcttaggtacttcagttcaccttaggggcttagcgctgagcacttagcgctaagcccctcaagggctcggcatcagcctgacaggcttagcccatactgcacagccctgaaaggagtacacgccatcagggaaggcttgagagtacgaggagcctcagcgacgagtactcgaaagcctgagggaacacctttagcactgatgggcctagcgcgttcggaaagaacacagaagtaaagtgtgacagctgtccgggagtgaaccccgttctggctaggggtttcagtcttaactacctgtaaaggttacaagactctaagaaaatttaagaaaattcttaagaagaaagttgtgttgttatcccccaaaaaacacccgtttacacccctcaaacccgcctatagagccaaatccgccagtttgactcgtcccaggtggcgtatgctaggctggacaggtagccagctggacgcgaggccagaaagtgctgacgcacttcccgacctcgcttaccatcagtctaccaaacactttaaagcttcaaggctaagccactcagtgctaagcccttaagacctcaacgcttagcaccgagcccttgaggggctcagcattagcactaaggcttaaacacttaataatttaagtaaacataaaagcttttaagacttaaagtaaatatataaccttaacagttaaacgtttaaagctttaaaccttaacacctaagttaggtataaaaccttaaaggcttagcacttaaggatataaacttaacatcagtgtttaagactttaaaacttaaagtaactataagacttaaagacttataagctttaatacttatataataataaagtttaagactgatggttaactttaagtgtttaaagtcttatagttactttaagttttaaagcttataagttataaaagttttagaagagctaaggggttaacttctttacttctctactctctttggttctttctctcttctcttcttttcttcatcaggggagaagaggaacctttaccatcagcgctgatgggctttcacggtgtgtctcgtgtgtctctggtcgcaagctcccatcgcaccctcgccacccctcaccttgaccgtgtctcctttacagcttggtgtgttcggctgaaggcgtacggcgtgtcacgctaacacccttaacaccaggtaagacttaaagtgtatattatatgtagaagactttaaaaactttgaggatgtacacgttttggctgtgacctacaccgctaggcgctaggccttgaaacgcgaacacaccctcccccatttttcttccgtgtccttcttcttttgacacagctggggggcgatgtgatctttctcacatgcaggggtggagggtagaaaacaaccaccccaccacaaacagaacaccccaccaaacgaacaaaacagggcctagaatcgaccagcagggcaagggcaaggtattcatacccccaacgcatttcaggctgttacagaggcaatcagaggcttacagggaccataggtgaacgggaggcgcgatggcacacaccaaccgcaccgcatccgccgcccaccggcgctggcggcaacgactcatcacccaagcccgacaacaaggccaaaccgaatgtcccttgtgtggagccaccatcacctgggacacacacgacctaccaaccagccccgaagccgaccacatcacacctgtcagcaggggaggactcaacaccctcgacaacggccaaatcatctgcagaacatgcaacagaagcaaaggcaacagaacacaaccaaacattcgattccaacaacaaaccacaaaaacattgattccatggtgacaaaccccacaacccccaccggggacaccccctgcacacccgtgcaagacc

SEQ ID NO: 45 - DNA, 29443 bp, unidentified
  source 1..29443: mol_type = unassigned DNA; note = Bacteriophage of P. acnes
agtgaaatacctcccttttgtggatttatctgtttgtcgactttttgtgttggtggtgagtgttgtgcagcctgagcttcctgggtctcgtgattggtgtggggagacgcttcgctggtggcgtgtgtggggtgaggatagtcgcgcatcgtacgtgtcggatgaggagtggctgtttctcatggatgctgcggtgattcatgattgtgtgtggcgtgagggccgggctgaccttgtggcttcgcttcgtgctcatgtgaaggcttttatgggcatgttggatcgttattcggttgatgtggcgtctggtggccgtggtgggggttctgcggtggcgatgattgaccggtatcggaagcgcaagggggcctgattaggtgtctggtgttgttgggtctcaggtgcctcgtcaccgtgtggctgcggcgtattcggtgactgccggcggggatgctggggaattgggtcgtgcgtatgggttgatgcctgatccgtggcagcagcaggtgttggatgattggcttgctgtcggtggtaatggcaggcttgcttctggtgtgtgtggggtgtttgttccgcggcagaatggcaagaatgctattttggagattgtggagttgtttaaggcgactattcagggtcgccgtattttgcatacggctcacgagttgaagtcggctcgtaaggcgtttatgcgtttgaggtcgttttttgagaatgagcggcagtttcctgacttgtatcgtatggtgaagtcgattcgtgcgacgaatggtcaggaggctattgtgttgcatcatccggattgtgccacgtttgagcgtaagtgtggctgtccgggttggggttcggttgagtttgtggcccgttctcgtggttctgctcgcgggtttacggttgatgatttggtgtgtgatgaggctcaggagttgtcggatgagcagttggaggctttgcttcctaccgtgagcgctgcaccgtctggtgatcctcagcagattttccttggtaccccgccggggcctttggctgacggtagcgtggtgttgcgtcttcgcgggcaggctttgtcgggtggtaaaaggattgcgtggacggagttttcgattcctgacgagacggttccggatgatctatcgaggtcgtggcggaagttggctggggatacgaatcctgcgctgggtcgccgcctgaatttcgggacggtgagcgatgagcatgagtcgatgtcggctgccgggtttgctcgggagaggcttggctggtgggatcgtggccagtcggctacgtctgtgataccggccgataagtgggctcagtctgctgtggatgaggcgagtctggttggcgggaaagtgtttggtatctctttttcgcgatcaggcaatagggttgctttggctggtgccggcaggactgatgctggtgttcatgttgaggttattgatggcctgtcggggacgattgtggatggtgtaggccagctggctgactggttggcgttgcgttggggtgacacggaaaagatcatggttgccggttcgggtgctgtgttgttgcagaaggctttgactgatcgtggtgttccgggtcggggtgttgtggttgccgatactggggtgtatgtggaggcgtgtcaagcctttctggaaggcgtaaggtctgggagtgtttctcatcctcgtgctgattctcgccgtgacatgttggatattgctgtaaggtcggcggttcagaaacataaaggctctgcgtggggttggggttccacatttaaggacggttctgaggttcctttggaggctgtgtcgctggcgtattttggtgcgaaaacagttaaagcgaagcggcgtgagcgtagtggtaggaagcgggtgtctgtggtatgaactcggatgagttggctctgattgagggcatgtttgatcgtattaagagtttgtcttcgtggcattgtcgcattgagggctactatgagggttctagccgggtgcgtgatttgggggtagctattcccccggagttgcagcgtgtgcagactgtggtgtcgtggcctgggattgcggtggatgctttggaggagcgtctggattggctgggctggactaatggtgacggctacggcctggatggtgtgtatgctgcgaatcggcttgctacggcgtcgtgtgatgtgcatttggatgcgctgatttttggtttgtcgtttgtggctatcattcctcatggtgatggttcggtgtcggttcgtccgcagtcaccaaagaattgtactggccggttttctgccgatgggtctcgtctggatgctggccttgtggtgcagcagacgtgtgatcctgaggttgttgaggcggagttgttgcttcctgatgtgattgttcaggttgagcggcggggttcgcgtgaatgggttgaggtggatcgtataccgaatgtgttgggtgctgttccgcttgtgcctattgtgaatcgtcgccgtacttctaggattgatggccgttcggagattacgaggtctattagggcttacacggatgaggctgtgcgcacactgttggggcagtctgtgaatcgtgatttttatgcgtatcctcagcgttgggtgactggcgtgagcgcggatgagttttcgcagcctggctgggtcctgtcgatggcttctgtgtgggctgtcgataaggatgatgatggggacactccgaatgtggggtcgtttcctgtcaattcgcctacaccgtattcggatcagatgagactgttggcgcagttgacggctggtgaggcggctgttccggaacgctatttcgggtttatcacgtctaacccgcctagtggggaggctttggcggccgaggaatctcggcttgtgaagcgtgctgagcggcgccaaacgtcgtttggtcagggctggctgtcggttggtttcctggctgccaagtcgcttgattcttccgttaacgaagctgatttttttggtgatgttggtttgcgttggcgtgatgcatcaacacctactcgggcggctacagcggatgctgtgacgaagctggttggtgccggtattttgcctgctgattctcgcacggtgttggagatgctggggcttgatgatgtgcaggttgaggctgtgatgcggcatcgcgccgaatctgcggatccgttggctgcgcttgctggggctatttcccgtcaaacgaacgaggtttgatggatggcttcgggtgctatgtcgaggctggctgcgactgagtatcagcgtgaggcggtcaggtttgctgggaagtatgcgggctattattctgagcttggccgtttgtggcgtgccggcaggatgagtgacacacagtatgttcgtttgtgtgtggagttggagcgtgccggccatgatggttcggcgtcgttggccgccaggtttgtgtcggattttcggaagcttaacggtgtcgatcctggtttgattgtgtatgacgagtttgatgctgccgcggctttggctaggtcgttttcgactatgaagattatgaatagtgacccggatcgggcgaatgatacgattgatgcgatggcggcgggttttgatcgggctgtcatgaatgctggtcgtgacacggttgagtggtctgcgggtgcgcagggtaggtcgtggcgtcgtgtcacggatggggatccgtgtgctttttgtgccatgttggctacgaggtcggattatacgactaaggaaagggcgctcactactggtcatacgcggcgtcataagcgtggtggtaagcgtccgtttggttcgaagtatcatgatcattgtgggtgtacggtggttgaggttgttggcccttgggaaccgaatagggctgatgccgagtatcagaggacgtatgagaaggctcgcgagtgggttgatgatcatgggttgcagcagtcgcctggcaatattttgaaggctatgcgtactgttggtggcatgagataatttgatgtggtttccggttgtgcgccgccggttatcggtgcacagggttgtctcccgcacgggggtcaacaatgttgtgttgttttccgcaaggagtgtagggttaggctatggccgatcagagtgttgaggaacagaatgttgacaatgatgttgtggagtccggaaagggtgacggcattgttgacacggtgaagggcgatcaaggcaaacaggttgaagatcagtcgaagaatgaaggcgagggtaaatcgccggggactgattggaaggctgaggctcgtaaatgggagtctcgtgcgaaaagtaatttttccgagctggagaagcttcgtacatcgagtgacgattctggatctactattgatgagcttcgccgcaagaatgaggaactcgaagacaggatcaacgggtttgttcttgagggtgtgaagcgtgatgtggctgccgagtgtggcctttcgggtgatgctgtcgcttttctgcacggcgacgatcgtgaagcgctggtggagtctgctaaggctttgaagggtttgatcgaccatagtagtggtggcgcgggtgtgcgccgtcttgcggggagtgcccccgttgatgatgttaaacgacgtgagggtgtcgcgtttgtggatgctcttgtcaataattctaggagatgatttgtgatggctgacgattttctttctgcagggaagcttgagcttcctggttctatgattggtgcggttcgtgaccgtgctatcgattctggtgttttggcgaagctgtcgccggagcagccgactatttttggccctgtgaagggtgccgtgtttagtggtgttcctcgcgctaagattgttggtgagggtgaggttaagccttccgcgtctgttgatgtttcggcgtttactgcgcagcctatcaaggttgtgactcagcagcgtgtttcggacgagtttatgtgggctgatgctgattaccgtctgggtgttttgcaggatctgatttccccggctcttggtgcttcgattggtcgcgctgttgatctgattgctttccatggtattgatccggctacgggtaagcctgctgcggctgtgaagacttcgctggataagacgaagcatgttgttgatgccacggattctgccacgactgatctggtcaaggcggtcggcctgattgctggtgctggtttgcaggttcctaacggtgtcgccctggatccggcgttctcgtttgctctgtcgactgaggtgtatccgaaggggtctccgcttgccggtcagccgatgtatcctgccgccgggttcgctggtttggataattggcgcggcctgaatgttggtgcttcttcgactgtttcgggtgccccggagatgtcgcctgcctctggtgtgaaggctattgttggtgatttctctcgtgtccattgggggttccagcgtaacttcccgatcgagctgatcgagtatggtgacccggatcagactggccgcgaccttaagggccacaatgaggttatggttcgcgccgaggctgtcctgtatgtggctatcgagtcgcttgactcgtttgctgttgtgaaggagaaggcttccccgaagcctaatccgccggccgagaactgatttatttgttgcgataatgttcatgctgtgtgcagggggtggtgttgatgggtatcattttgaggcctgaggatattgagcctttcgccgatattcctaaagataagcttgaggcgatgattgccgatgtggaggctgttgctgtcagtgtcgccccctgtatcgctaaaccggatttcaaatacaaggatgctgctaaggctatcctacgtagggctttgctgcgctggaatgatactggtgtttctgggcaggttcagtatgagtctgcgggcccgtttgctcagactacacggtctagtactcccacgaacttgttgtggccttccgagattgccgcgttgaagaagctgtgtgagggtgatggtggggctggtaaagcgttcactatcacaccgaccatgaggagtagtgtgaatcattctgaggtgtgttccacggtgtggggtgagggttgctcgtgcgggtcgaatattaacggctacgctggccctttgtgggagatatgatatgaccagttttccttacggtgaaacggttgtgatgcttcagccgactgttcgtgtcgatgatttgggcgacaaggttgaggattggggtcatcctgtagaaaccgtgtaccataacgtggctatctatgcttccgtttcgcaggaggatgaggccgcggggcgtgattctgattatgagcattggtcgatgcttttcaagcagcctgttgtgggcgctgattatcgttgtaggtggcgtattcggggtgtggtgtgggaggctgacgggtctcctattgtgtggcatcacccaatgtctggctgggatgctggtacgcaggttaatgtgaagcgtaagaagggctgatggttgtggcacgtgatgtgaatgtgaagcttaatcttcctggtatccgtgaggtgttgaagtcttctggggtgcagggcatgttggcggagcgtggcgagcgtgtcaagcatgcggcctctgctaatgttggcggtaatgcttttgatagggcccagtatcgtgccgggttgtcgtcggaggtgcaggttcaccgtgttgaggctgtcgctaggattggcaccacctataagggtggtaagcgtattgaggcgaagcatggcacgttggctaggtcgattggggctgcgtcgtgatcgtttacggtgatccgcgaatatgggcgaaacgcgtgctcaaggatgatggctggctgtccgatataccgtgtacaggtactgtcccggatgatttcacgggtgacttgatttggttggcgttggatggtggcccgcagttgcatgttcgtgagcgtgtttttttgcgggtgaatgtgttttctgatatgccggatcgtgctatgtctttggcgcgtcgtgttgaggctgtgctggctgatggtgttgatggtgatccggtggtgttttgtaggcgttctactggtcctgatttgttggttgatggtgcacgttttgatgtgtattcgctgtttgagctggtgtgccgtcctgtcgaatccgagtaaacgtatttgttttctatattttgtttttgtttgattatttttgggggttgtgatggctgctacacgtaaagcgtctaatgttcgctctgctgttacgggtgacgtctatattggtaaagctcatgccggtgacactattgatggtgtgaagacggttcctgacggtcttaccgctttagggtatctgtctgatgacgggtttaagattaagccggagcgtaaaacggatgatttgaaggcttggcagaatgcggatgttgttcgcactgtggctacggagtcgtctatcgagatttctttccagctgatcgagtctaagaaggaggttatcgaactgttttggcagtcgaaggttactgccggagccgattcgggttcgttcgatatttctcctggtgccacgacgggtgttcatgccctgttgatggatattattgatggcgatcaggttattcgctactatttccctgaggttgagttgattgatcgtgacgagattaagggtaagaatggcgaggtgtacgggtatggtgtgacgttgaaggcgtatcctgcccagattaataagaatggtgatgcggtgtcgggtcgggggtggatgacggctttaaaagctgatactcctccgactcctcctccggccccgaagcctccgaagcctgagccggatccgaatccgccgtctaataactgatacacatagtttgagggattgttgatagatgagtgacacaggttacacgttgaagattggtgaccgtagctgggtgttggcggatgcggaggaaacggcgcaggctgttcctgcccgcgttttccgtcgtgccgccaggattgcccagtcgggggagtctgcggatttcgcccaggttgaggtgatgttttctatgttggaggctgccgccccagaggatgctgtggaggccttggaggggcttcctatggttcgtgtggccgagattttccgccagtggatggaatataagcctgaaggtaagggtgcctcgctgggggaatagtttggctccacggcctgattgatgattatcgtggggccatcgaatacgatttccgcactaaatttggtgtttctgtttatagtgttggtggcccgcagatgtgttggggtgaggctgtccggctggctggcgtgttgtgtaccgatacgtctagccagttggcggcccacctgaatggttggcagcgcccgtttgagtggtgtgagtgggctgtgctggacatgttggatcattacaggtctgctaatagtgaggggcagccggagcctgtggcgaggcctacggatgagcgtagggcccggtttacgtctgggcaggtggacgatattttggcgcgtgttcgtgccggcggcggggtgtctcgcgagattaatattatggggtgaatagtgtatgtctggtgagattgcttccgcatatgtgtcgttgtatacgaagatgcctggccttaaaagtgatgttggtaaacagctttctggggttatgcctgctgagggtcagcgttcgggtagtctttttgctaagggcatgaagttggctcttggtggcgccgcaatggtgggtgctatcaatgttgctaagaagggcctcaagtcgatttatgatgtgactattggtggcggtatagctagggcgatggctatcgatgaggctcaggctaaactgactggtttgggtcatacgtcttctgacacgtcttcgattatgaattcggctattgaggctgtgactggtacgtcgtatgcgttgggtgatgcggcttctactgctgccgcgttgtctgcttcgggtgtgcagtctggcgggcagatgacggatgtgttgaagactatcgccgatgtgtcttatatttcgggtaagtcgtttcaggatacgggcgctatttttacgtctgtgatggctcgcggtaagttgcagggcgatgacatgttgcagcttacgatggcgggtgttcctgtgctgtctttgcttgccaggcagacgggtaaaacctcggctgaggtgtcgcagatggtgtcgaaggggcagattgattttaacacgtttgcggctgcgatgaagcttggcatgggtggtgctgcgcaggcgtctggtaagacgtttgagggcgctatgaagaatgttaagggcgccttgggctatcttggtgctacggctatggccccgtttcttaacgggttgaggcagatttttgttgcgttgaatccggttattaagtcggtcacggattcggtgaagccgatgtttgctgccgtcgatgctggtattcagcgtatgatgccgtctattttggcgtggattaatcgtatgccgggcatgattacgagaatgaatgcacagatgcgcgccaaggtggagcagctgaagagcgtttttgcgagaatgcatttgcctgtcccgaaggtgaatttgggtgccatgtttgcgggtggcacagcagtgtttggtgttgtggctgcgggtgtggggaagcttgttgcagggtttgccccgttggcggtgtcgttgaagaatcttctgccgtcgtttggtgctttgaagggtgccgctggcgggcttggcggcgtgtttcgcgccctgggcggccctgtcggtattgtgatcggcttgtttgctgccatgtttgcgacgaacgcccagttccgtgccgcggtgatgcagcttgtggctgtggtgggccaggctttggggcagattatggccgctattcagcccttgtttggtttagtggccggtgttgtggcacagttggcgccagtgttcggccagattatcggtatggttgccggtttggctgcccagattgtgcctttgattagtatgcttgtcgcccggctggttcctgtgattacgcagattattggtgcggtgactcaggttgctgcaatgttgttgccggcgttgatgccggtgcttcaggcggttgtggctgtgatacggcaggttgttggtgttgtgatgcagcttgtgcctgtgttgatgcctgtgattcaacagattttgggtgctgtgatgtctgtgttgccgccgattattggtttgatacggtcgctgataccggtcatcatgtctgttatgcgcgtagtggtgcaggttgtttcggttgtgttgcaggtggttgcccgtattattccggttgtgatgccgattgttacggctgtgatcgggtttgttgcacgtattttgggtgctattgtgtcggctgccgccaggattattggggctgttgcccgtgttgtcggatgggttgtgggccatttcgtgtcgggtttggcgcgtatgggttcggttattcaggctggctggaatcatattagggcttttacgtctgcgtttattaacggtttcaagtcgatcatttctggcggcgtgaacgcggttgtcgggttttttacgcggcttggtttgtcggttgcctcccatgtgaggtctggttttaacgcggcacgtggtgctgtttcttctgcgatgaatgctatccgtagtgtggtgtcttcggtggcgtctgctgttggcgggtttttcgggtcgatggcgtctagggttcggaatggtgctgtgcgcgggtttaacggggcacggagtgcggcctcttctgctatgcatgctatggggtctgccgtgtctaacggtgtgcatagtgtactgggttttttccggaatctgcctggcaatattcggcatgctctcggcaatatggggtccctgttggtgtctgctggccgtgacgtggtgtctggtttgggtaatggtattcggaatgctttgagtggcctgctggatactgtgcgtaatatgggttcccaggtggctaacgctgcgaagtctgtgttgggtattcattccccgtcgagggtgtttcgtgatcaggttggccgtcaggttgttgccggtttggctgaggggatcaccgggaatgctggtttggcgttggatgcgatgtcgggtgttgcttcgcagcttccggatgctgtggatgcccggtttggtgtgcgatcgtctgtgggctcgtttaccccgtacgaccggtatcggcgtgctcagggtgagagtgttgtggtgaatgtgaatggcccgacgtatggtgatcctgccgagtttgcgaagcggattgagcgtcagcagcgtgacgctttgaacgcgttggcttatatgtgagtaaaggggtatgcatgtttattcctgacccgtctgatcgttctggtttgactgtgacatggtctatggatccgcggtttggtgatgagcgtgtgcttcatttgacggattatacggggtcgtctccggtgatgttgttgaatgattcgttgcgcggtttgggtgttcctgaggttgagcatttttctcaaactcatgttggggtgcacgggtcggagtggcgcgggtttaatgtgaagcctcgcgaggtgacgttgccggtgttggtgtcgggtgttgacccggatccggtgggcgggtttcgtgacggttttttgaaagcctatgacgagttgtggtctgcgtttcctcctggcgaggagggggagctgtctgtgaagactcctgccggtgtagagcgtgtgttgaagtgccggtttgattcggtggatgacacgtttacggttgatccggttaatcgtggctatgcgcgttatgtgcttcatttgacggcctatgacccgttttggtatggggatgagcaaaagtttcgtttcagtaacgcaaagttgcaggattggttgggtggcggccctgtcggcaaaaacgggactgcttttccggtggtgttgacgcctggtgttggttcgggttgggataacctgtcgaataagggtgatgtgcctgcgtggcctgtgattcgcgttgaggggccgttggattcgtggtcggtgcagattgatggtttgcgtgtgtcttcggactatcctgtcgaggagtttgattggatcactattgatacggatcctcgtaagcagtctgcgttgttgaacgggtttgaggatgtgatggatcgcctggatgagtgggagtttgcgccgattccgcctggcggttctaagagtgtgaatattgagatggttggtttgggtgccattgttgtgtcggtgcagtacaggtttttgagggcgtggtgaattgttgtggctggtcttgtcccgcagataacattgtttacgccagactatcatcgtgtggcgcctatcaatttttttgagtcgctaaaattgtcgttgaagtggaatggtttgtcgacgctggagttggtggtgtctggtgatcattcgaggcttgacgggttgacgaggccgggtgcacgcctggttgttgattatggtggtggccagattttttctgggcctgtgcgtaaagtgcacggggttgggcctcggcggtcttcccgtgtgactatcacttgtgaggatgatattcgcctgttgtggcgtatgttgatgtggcctgttaattatcgccccggtatggtgggttctgagtggcgtgcagaccgggattatgcccactattctggtgcagccgagtctattgctaagcaggtgttgggggataatgcttggcgttttccgcctggtttgttcatgatagaggatgagaagcgtggccgctatattaaggattttcaggtgcggtttcacgtgtttgcggacaagttgttgcctgtcctgtcgtgggctcggatgactgtttcggtgaaccagtttgagaatgcgaagacggatcagcgggggctggtgtttgattgtgttcctgctgtgacgcgtagccatgtgttgacgtccgagtcgggttcgattgtgtcgtgggagtatgtgagggatgcccccaaggctacgtcggtggttgttggtggccgcggcgagggtcgggatcggctgttttgtgaggatgttgattcgatggccgagggggactggtttgatcgtgtcgaggtgtttaaggatgcccgtaacacggattctgaacatgtgcatctcatcgatgaggctgagcaggtgttgtccgagttaggggccacgtcggggtttaagatcgagttggccgagtcggatgtgttgcgttttgggccaggcaatctgatgccaggggatttgatttatgtggatgtgggctcggggcctattgaggagattgttcggcagattgatgtggagtgtgattcgccgggtgacggctggacgaaagtgacaccggttgcgggggattatgaggataatccgtcggcgttgttggctcgccgtgtggctggtttggctgcgggtgtgcgggatttgcaaaaattctaattgttgggggtttgttgtgggtattgtgtgtaaagggtttgatggtgtgttgaccgagtatgattgggctcaaatgtctggtctgatgggtaatatgccgtcagttcatgggcctgacgattttcgtgtgggcactactgttcagggtgctacggtgttgtgtgaggttttgccggggcaggcttgggctcacggggtgatgtgcacgtcgaatagtgttgagacggtgacggggcagctgcctggtcctggtgagactcgctacgattatgtggtgttgtctcgggattgggagcagaatacggccaagttggagattgttcctggggggcgtgcggagcgtgccagggatgtgttgcgtgccgagcctggcgtgtttcatcagcagttgttggctactttggtgttgtcgtctaacgggttgcagcagcagttggataggcgtgccgtggcggctagggttgcgtttggggagtctgctgcgtgtgatcctacccctgtggagggtgaccgtgtgatggttccttcgggggctgtgtgggctaaccatgctaacgagtggatgttgttgtctcccaggattgagacgggttcgaagtcgatcatgtttggcgggtctgctgtgtatgcttacacaattccgtttgagcgcccgtttggtagtgcgcctgttgtggtggcgtctatggctacggcggctggtggtacgcagcagattgatgtgaaagcctacaatgtgactgccaaggattttggtttggcgtttattacgaatgatggttcgaagcctaacgatgtgcccgcaatagctaactggattgctgtcggcgtgtgactgtacaggtgttgtggcggatgttgtaatgttggggggctgtggtgtcgtggtttactcctgcactggtggcctctatctgtaccgcgttggccacgattttgggttcagttcaggcggtcacatctaaatcgaggaagcgtttacgcaggctatctgcgcaggttgatgcgatggaagagtatacgtggggtgtgcggcgtgaggtgcgccggtttaacgcgaggcttcctgacggggttgatccgcttgtgttgcctgagccgcctggtttcctatcggatgatgttgggggtgagtgatgagggagttggaggaggagaagcggcagcgtcgctcgtttgagagggcttccctgctgttgttgtttttgtcgcttgtgctgttgattgtggttgctgggggtgctttgcgtttcggggctgtatcctctgaacgggattctgagcaggcgagggcccagtcgaatggtacagcggccaggggtttagccagccgtgtgcggcaggtgtgtgcccatggtgggatggagtcggtacggcttcaccggtctggtttgtgtgtggatgctgtgcgtacggagcggagtgttcagggtgtgccgggcccggctggtgagcgcggcccgcaaggccctgcaggtgctgatgggcgtgacggtgttaatggttcgtctgggctggttggccctgttggtccgcagggttctcccggcttgaatggcgtgaaaggtcctgacgggttgcctggtgcaaatggatcggatggccgtgatggtgttccgggccgtgcaggtgttgacggcgctgatggtcgggatggttcggctggtgagcgcggtgatgtgggtccttcaggtcctgccggcccgcaaggcacacagggggaacggggtgagcgtggccccgtcggtgcgaacggatccgatggtaaagatggtaaggatgggcgctcggtggtgtctgtgtactgttctgatggtctcctggttgtgaaatatagtgacggtgtggcttctacaatatcgggctcggtggcctgccagggtgtgaaaccgtcgcctatggtgactatatcatcccacaaatagaaaggagtggctgtgatggtagtgtttggtggtggtgtgtggtgaggtttatcccagcagcgcaccattctgccggttcgaatagtccggtgaatagggttgtgattcatgcgacgtgcccggatgtggggtttccgtccgcctcacgtagggggagggctgtttctacggcaaactattttgcttccccatcgtctgggggttctgcccattatgtgtgcgatattagtgagacggtgcaatgtctgtctgagtctacgattggttggcatgccccgcctaaccctcatagtttgggtatagagatttgcgcggatggtggctcgcacgcctcgttcagggtgccggggcatgcttacactcgtgagcagtggcttgaccctcgcgtgtggcccgcggtggagcgtgccgcgatcctgtgtagacgtttgtgtgacaaatataatgttccgaaaaggaagcttagtgcagccgatttgaaggctggcaggcggggtgtttgcggccacgtggatgttacggatgcgtggcatcagtcggatcatgacgatcctgggccgtggtttccgtgggacaaatttatggccgtagtctgcggcggtagtggtagtgaggagttaactgtggctgatgtgaaagccttgcatgatcagattaaacaattgtctgcccagcttactggttcggtgaataagctgcaccatgatgttggtgtggtacaggtacagaatggtgatttgggtaaacgtgttgatgccttgtcgtgggtgaagaatccggtgacggggaagttgtggcgcacgaaggatgctttgtggagtgtctggtattacgtgttggagtgtcgcagccgcattgacaggcttgagtctactgttaacggtttgaaaaagtgatggtggtttgttgtgggtaaacagttttggttaggtttactggagcgggccctgaaaacttttattcaaacgtttgttgccgtgctcggtgttactgcgggtgtcacgtatactgcggagtcgtttcgcggtttgccgtgggagtcggcgttgatcacagccacggttgctgcggtgttgtcggttgctacttcgtttggtaatccgacgtttgtggctggtaagccgaagactacggttgtggataccgggcttgttccacccgatgataccggtttgatagaaccgcatgcggtggatgtgtcggatcctggcatgattgagccgatggatgatgcggatgttgccggctatgtgccgaagcgggctgccgagtcggaggttggcacagtagagtctactgttgcataattgaatatgtgtgtgccccagcggtgctgccacgattgtgtggtggttgccgctggggcacactttttgtttatgcgatatggctatgattcgttgctgtcgatggtgtcttcgagcatctgatacaggtggaggcaggtgcagatggtttcgctggcctggtcgagaacgtttcggccgataacgtttttgtggttgtcgcggtggcggatgatagcccacatgatctcgtcggctgccgcctgtaatagttttgcctggtatgcgattccggcgagccagtctagtgcttcctggcttgcctgtgtgtcgtctggaataccacgggtgttgctgttgcttgggtgtccttcactgtcgcatagccacaggatttcgctgcactcgtctagcgtgtcctggtcgatagcgagatcgtcgaggctgacattgttgacggtaaggttcacgttgtcgagggagatgggtacaccgtactggttttcgacactgtcaacaatgttttgtagttgttgcatgttggtgggctgttgttggatgatacggtgtaccgctgctttgagggcagtgtaggggatattgtgtgtgttgttcatggttttatttcatccctgtgctgtcgtcgttatcgtctggatagtatctactgtttgcgtaccctgttagggtgatcaatgtttggtctgcccactgtttcacggtttgccgggttacccctaatcgttgggctgctaccgaataggtttgatcatacccgtatacttcccggaatgctgccaaccgtgctaggtgttttcgctgtttggatggctggcaggtgagggtgtagtcgtcgatggccagctggaggtcgatcatggagacgatgttgttgccgtgatgctggggggcggttggtgggggtggcataccgggttctactgatggtttccatgggccgccgttccagatccattgggcggcttggataatatctgcggtggtgtaagtccggttcactggtcaccccctgaacaggttgtcgaggttgtctgggttactggtgttggtggtgtcgaatcgtcccacacagtggcagtagtcgtacatgagtttgataatgtgttggtggtcgccgaggtaggtgttgccactaatactgtaggtggctgtgccgtctttgccgataatgtatttggcggtgatggtttctggtgtttcggtgttggtgatgattgctgttgtggtggtgcctacggtttgtagcctggtggtttgggttccgtcgtcgagggtggtggtaaccataattggggttttccttaaatgcttgtctggttgtcggctagatgaataatatcggataaaggtttcggctggtctaggtgctgtaccgctttgttggctaaacgtttggctaccctgtaacacattttggtatagtgtttgttgtctaggttgtggtattgttcccgcaccgcaatatatagtagggagtcttggtacaggtcgtctgcactgattgcggggtagtgggtggctactttgatgcatgaccggttgagtgtgcgaagatgatggtcggtggtccatccccacgatgcggtggtggcccggtctgcttttgttggtcgtctactcatggcactatttcatctcgctatctggtagttgtttggtgttttatggttgatagtgtagcacacgagtccggggttgccggtggtgcccgtcttgtgccggtaccatgtggattcgccttccatggatgggcattggatgaaggtgcgttgtccttgctcggagatttctaggtggtgtcggtgcccggccatgaggatgtgggatgtggttccgttgtggaattcttgtccgcgccaccaatcatagtgtttgccggtgcgccattggtgtccgtgggcgtgcaggatttgtgtgcctgccacattgacggtggtggtcatttcgtctcggctggggaagtggaagtgtaggttggggtattggttgttgagttggtaggcttcggcgatggcgcggcagcagtccacgtcgaaggagtcgtcgtaggtggtgacgcctttgccgaagcgcacggcttcaccgtggttgccggggatggatgtgaccgttaggttggcgcagtggtcgaattggtggatgagttgcatcatggccatgcgggtgagccggatttgttcggtgaggggtgtttgtgtgcgccaggcgttgttgcctccttgtgacacgtatccttcgatcatgtcgccgaggaatgcgatgtggactcgttgcggtttgcctgcctgttgccagtagtgttttgcgactatgagggagtgcaaatagtcgtcggcgaagtgtgctgtttctcctccggggatgcctttgccgatttggaagtctcctgccccgatgacgaaggccgcagtgctgtagtcggtgcgggtgtcttgttcgggttttggtggctgccattcggctagtttatctacgagttcgtctacagggtaggggtttgttgcgggttggtggtcgatgattttttgtacggatcggccggtttctccgttcggtaaggtccattcggagatgcgtgtgcggcgtacagtaccattggctagattgtcgtcgatggtgtcgatggcgttgtcgtggttggctagctgtgtgagtagccggtctatattgtctatcactgggtatcctcttcctcgtgtggggtggtgttggcttgtttgcggcgatagtctttaataacggtggcggagatggggtatccggcttgggtgagctgttttgctagccatgaggcggggatggttttgtcggcgaggacgtctgcggctttgttgccgtagcgttggataagggtttcagttttggttgccatgatatcctaggggttgtgtggcgggttgccatcctgtgcggcagtcgccgtcgtgtcctggcttacgggtgcaccatgtgatggttccgtctgtgtggtggagttttttgccgcacatgacgttttgtagatgctccggcagctggtcggtgttgttgctggtttgtatgtcgaagagtgttttctggttggtgaaatgctctgacacggtgccattatgcacgggtagtatccatgttttccattgctgttgtagcctggtgttccagtggaattgtttggcggcgttttcggcctgttttaaggttttgtagtagccgactagtatgcgctggtgttcactgtcgggtgggttttggcctcgccaatattgtgccgccacggcgtagcggttgctggctgtgaaggcgtcccagcagtattcgataatgtgttgtagtgcactatcgggcatgtcttgtatttggttttcgttaagccattcttcaacaaggatgttgtgtatggcgcgtttgtctttgatggttggtttgaacgagatgctcacgatagtaccggctggtcgtcttgcatgaactggttgaaggtgttgtttccggcgtgttgggcttgtgtgatgtcctggtcggtccagtcggggtgttgctgtttcagatagtgccagtggcacgcattgtaggtttcgtcttgtagccgtgtgagatggttttcggtgatgatttgtttccacattgtccatgacacgtcgagccggttgaggatttcgagggctgggatgttaaattggttgaggaagagtatttcgtgggtgtagtagtttttctcgtaggcgtcccatccgcttcggtgcctgttgggctggtttttggggtaggcttcccggcatactttgtgcaaatgtttggccatgtcgtcgggtagtttaatgtcggggttggcgcggatcatggatcgcataccatcataggtggtgccccaggtgtgcataatgtaggtggggttttctccatcagcccatttttctgcacagatggcgaggcggatgcgcctcctggctgcttggctaatgttgcgccggttggggatggggcacgtgtctaggggatccatgatgttttagtgtacctttctttgttggggttgcttgtgtggttttattgtagcactgtgttgagtgcttgtgtcaaccctgttttgccggcctgaaggtaggtgtctgtgacatcccccagggtgaggggcacgtgtacggcttgggggagtgctgtttggagggtttgggccatcttgtctcccgcggggtcgggatcggaccagatgtaaacatggtcgtagccttcgaagaatttggtccaaaagttttgccacgaggttgcgccgggtatggcgacggccgaccatccgcattgttcgaggatcatggagtcgaattcgccttcgcaaatgtgcatttcggctgccgggttggccatggcggccatgttgtagatggagcccgtgtctccggccggggttaagtatttggggtggttgtgttctttgcagtcgtgtgggagtgagcagcggaaacgcatttttcttatttcggctggccgcccccaaacggggtacatgtaggggatggtgatgcactggttgtagtcttcgtggcctgggatggggtcattgtcgatgtatccaaggtggtggtagcgggctgtttcttcgctgatgcctcttgctgagagaaggtcgagaatgttttcgaggtgggtttcgtagagggccgaggctttctggattcggcggcgttccgcaatgttgtatgggcgtatgctgtcgtacattcgggtttctttcttcgagttgttgttgtagtttggcgaggccgcctccgacaccgcatgtgtggcagtaccagacgcccttgtcgaggttgatgctcatggagggttggtggtcgtcgtggaacgggcagaggatgtgttgctcgttcctggacgggttgtagcgtatccggtaggtgtcgaggaggcggcaggtgtcagaggtgtgggaggagttctgcgagggttgataccacataggcttcgctccatggcttgttgcgctgtttcatgaccactaacccgattgtggatttgtcaaccaggttgcggtgggtttcatagttgcgcgcctcccggctggcttgtttcacgaattgggcgagatgttgctgtcctgctttcgcttcgatcacataggttttgtggccggttgtgaggatgaggtcgccttcgtcttcgtggccgttgaggtgtagccgttcgatgtcgtgtccgatgtcacgtagctggtgcaataatcgtgtttcccactcggcaccggcccggcggttgcgtgattgctgtgtagccatcataatcctttgtgtgttgtggccatgttccatggctgtttttcggctagtggtccgaagaatgtgtattcggggtaggctcgtagccgttcgtatcgggtgccgtctgggctggatttgcctgtgcgctgtttcaacactgcgatgcgcgcctctgccggtatcgatagcccgttgccgttatcctcgccaccatacaatgagactccgaggatgagttgtggtttctcggatagcccgtttttgatctctcgtctggcgggcgggtgttcgatgtcggagccggttttgtcggttgcgtggtgtgtgacgataatggtggagccagtatccctacctaatgctgtgatccattgcatggcttcttgctgtgcctggtagtcactctcgcagtcttggatgtccatcaggttgtcgataacaatgagtggtgggaaggtgttccacatttccatgtaggcttgcagctccatggtgatgtctgtccatgtgatgggtgactggaatgagaatgtgatgtgttggccgtggtggatgctgcctcgatagtattctggcccgtagtcgtcgatgttgtgttgtatttgggcggttgtgtgttgggtgttgagggatatgattcgtgtggaggcctcccagggtgtcatgtcccctgaaatatatagggcgggctggttgagcatcgcggtgatgaacattgctagcccggatttttggctgccggaccgccccgcaatcatgacgagatcccctttgtggatgtgcatgtcttggttgcggtagaggggttctagttgtggtatacggggcagctcagcagcggtttgggaggctctctcgaaggatcgttgtagagagagcatcgggaccttaatctatctatctgttacggtttggatgaatattggcggtcagatggagtcgatatctacatcatcgctgccggtggtgttgggctggctgtctcgctggtcaacgtaggcggctacaaggtcgtagatggcgtcgtctaggggtttgaggatgacagcgttgaacccgtttttagtgcgcactgtggcgagtttgaaggcctgctcctcgccgaggtaggtttcgagttcgcggatcatggagtgtgggcggtcgttgttgcctcgcgctttttcgatgatagcgttggggatggtttctggggtgccgttgttgaggtcgtcgagggtgtggaagatagtaacgtcggcgtaaatacggtctgcgacctgtccgccgtagccttcggtgttgtgttccacgtcgtggattttgaaggcgatggcggtggcgtcctggtttttggacgggttgaagaaggtgctgctgttgctgttgttgcggtagttggcgagtcccataacttttgtccttttgctgtttgtgttgttttgttgtcttatattggtttatcgggtgaggctgtttcgtttagtgcggaacgcctcagacacgtcactgttactggtgatgatctttttgtactgtttcaagaggtctgctaattgtgctttactggtggctttgttgatcctgtcgatgataatgtcgttttcttgattggcgattttgttgacgtagtctttggctgctttgtcgtatcggtcttggaggatgatggatgcgctcgctacgagcgttgccagatcccagtctttggagactgtttcgtctttgagtccgcctagcaggtcgatgatggcctgttttgtctgctctgctgtgtctcctcggatgaccgcccatggtgcagcatagtctccaccatatttgagtgtgatagtgagtcgatcattgtctgtggtgcgctcttctgtcacttgttttccttttctttattgtctgcttggggtggctgtacggtggattctaccgggtatctgtaggcgtctttcccgtctaccgcccagcaggcgtcctgtacggggcatcctttacagagtgctgtaacatgtgggacgaagatgcctttgctgattcctttcattgcttgactgtacatggatgatacatgccggtaggtattgttgtcaagatcgtacagttcggttgctgtgccctgagtttgcgatgtggtgttgtttcggctgctggcgggtgtccaaaacatgcctttcgtcacgttgatgtcgtgttggttgagcatgtaccggtaggtgtgcaactgcatggcatcaacagggaggcgacccgttttgaggtcgagaataaacgtctcaccagtgtcggtgtcggtgaagatacggtcgatgtagccaacaatctttgtgccgtcctggagggtggtttcgactgggtattcgatgcctggctggccgtcgagtattgctgtgtggtattgtggatagtttgtgcgccactgtttccacctgtcgacgaagatggggccatagatcatccaccagtcgtagtctttcttgtgtggcccgcctgactcgcacatgtttttgcacactctgccggagggtttgatttctgtgccttcggattcgacgagggcaacttgggtgtcgaaaacgtttttgaaggatgagagtttgtctggcagtgcagggtattcgtcggggttgtacaggtggaggtcgtactgttcggtgatgtggtgtatggcgcttccggcgatggttgcgtaccaggtgtggtgctgtgcatgatagccgtgggataggcgccatttttctccgcattcggcccactgggtgagtgaactgtaggagatgtggcctggatggttgatggttttcggatattgtgctagaggcattacttgtcgcttttgttccatgggttgcgggtgtcttggccggcattgtgttgctggtaggcgaggagtgctaggcagtgccaggctgcgtgtgccaggtgtggcaggtgtgattcatcgtcgaggttgtttccttgctgccaggatagcacatggcggtagagggcgtcgacactgtgacaccaggggtatcctccggtccagttgttgtcgccgtatttggtggcaccgtagcctgctacttcgcctagggcgtgcaaggctacggggtcaatgagggagagcctgcagagtttgagttcttttcgggcacctgtgtcggggtcggtgtacatgcgggtgggctcatccatggggggtgtgtgcctttcttggtttgggttactggttgttgtcgtgggctagtgctactgcgagaataatgatggcgagggtttcagcaataagtatgggtgttgtgatcatttgctgtctcggggattgttggtgagggttgaggcacccaggagggtggcgagggcgcatgcggcgataatggcgagggctgccttgtggggggtgccggttgcgtacatccatgtgatgatgccgccttggatccatgccagtgtggtgaagaaggtttcgtaactgtgcaactcgatactgttgggtgtgttcatgctcgctcctgaagaatggtgttgatggttttgtaaatgttgtacaggtcggtttcgatagataacagttggtggatttggtggtcgaggttgatatctgggttgagggtgttgatgcgggatgcgatgtcggtggctgtgcgtagtgtgccgccggtgtggtgaataatgtgtgcggtgtcggcgagtccggtggtgacagcatagtgggagaggagaggcatagcggggatgctccttggcgggttactgttgcgggttgatgttgaggtcggtgacgtgcgggtggtcttctgttcctgtgatgaggcagtggacggtgactgggagtttggatgcgccgggctgtttcatggttgcgccgtagacgatgctgaacgtgtctttaccgatggttttgtggagttggaggtcgatgtcggggttgccgttccagttgacgccgtgtgcggcggccttctgttcggctttacggttgcaggtgtgtgctgcggtgatcatggtgagaccctgcgcggtttcttcaccccttgcttgggcttgcttgtgggttttggcttgttcggcttgtagggagcgggtggcggctgcctgccgtgccgctttctcggctttgcgctgttgggcggtttttggtgtccattctgtgttggctgtggttacctgtggtgcgggttgtgatgcgagtggggggttgtcgtcgggggctgggaggaaggatgcggcggcgatgatggcggctgtgattccggcgatggtgtagccgtttttcttgttcatgactgttatcccctttccggggtgttgttcgttgctgacatgattgatacttccagacggggctatgactgtcaaggtgtcgctcagtttgtgtgagcgatccttgtgtggctgggggttatcgggcgaacagggtgagtaggtgtcctaagttgatgcgactcacgttccagtagagttgcgtggcttcaccgccagtgagcggcttccacttgttgtggctgaacactgtaccgtcggatgctatgaacgtgtcggggcgtagcttgtgaagttcagtctctacgctctgccggtaggcttcggcgaggccctcaaaatccatgtggtcaccggagaggttttcgaggcgtgtcaggtcgaagggtgtggggcagtcgtagctggcgggggtgtagagctgggtgaagtggtcggcgatcttttgcatcatgattccttttctagtgtggtgggttaatagttttatcgggtggatgcgacaaggatggcgtctatgtcgatcatgtcgatgagatcgtggagttcctcggcctcattctcagataggtggcgccagtcgtagtcgccgtacacggcgccgtcgagggtgacagtccacaggggccggatgagccgtatggcttcttgtactttggcgtggtacatgcggcgcaccatatccagatcgatgtcgtctgaatggtttccggtgaggctgtggagactgagggggtcgatttctgtctgctggtagaggctggtgaaggatggggtgatgagtgtgccatccatgggggggtgctcctttctggattgtttgggttggttgttgtggtttctaggatgtgtaggttgcgacccacagtcaaggctgcgctcaatccgaatgagcgtttagcgtgtgtggcatgggatgtggcgtatctcacttaagccttccttgcctctctaggcgtctcaaatcttctgggggtaggattatatagggttgaccctgctgatcgattctagagcccttctagggcctctcgggggtatgtctgagtgatgacgggtgtggcagatgatctagcgagtcaaggtgccgagcttagacataaaatctatcatctaggtgtgtgagatgtatcacatcctcctggcttggtgtgcactttcaaggctactctgtcgatctgacgtggagggtgtagcccagaaataccgtttaaagccactgggagacgcctagaagcgccttacggggtgggggctaggtatttatacccccagcatattctgatcgattctagacgcctacagaagcctggtacacgatcagctatccagacgcagaccatcagcccctatcccgcttagctaagcctgcactatgtggacattgttggatactgtagaggaaagaaggacacggtaaaggaaagagggggaatcagtcttagggtcttaggtacttcagttcaccttaggggcttagcgctgagcacttagcgctaagcccctcaagggctcggcatcagcctgacaggcttagcccatactgcacagccctgaaaggagtacacgccatcagggaaggcttgagagtacgaggagcctcagcgacgagtactcgaaagcctgagggaacacctttagcactgatgggcctagcgcgttcggaaagaacacagaagtaaagtgtgacagctgtccgggagtgaaccccgttctggctaggggtttcagtcttaactacctgtaaaggttacaagactctaagaaaatttaagaaaattcttaagaagaaagttgtgttgttatcccccaaaaaacacccgtttacacccctcaaacccgcctatagagccaaatccgccagtttgactcgtcccaggtggcgtatgctaggctggacaggtagccagctggacgcgaggccagaaagtgctgacgcacttcccgacctcgcttaccatcagtctaccaaacactttaaagcttcaaggctaagccactcagtgctaagcccttaagacctcaacgcttagcaccgagcccttgaggggctcagcattagcactaaggcttaaacacttaataatttaagtaaacataaaagcttttaagacttaaagtaaatatataaccttaacagttaaacgtttaaagctttaaaccttaacacctaagttaggtataaaaccttaaaggcttagcacttaaggatataaacttaacatcagtgtttaagactttaaaacttaaagtaactataagacttaaagacttataagctttaatacttatataataataaagtttaagactgatggttaactttaagtgtttaaagtcttatagttactttaagttttaaagcttataagttataaaagttttagaagagctaaggggttaacttctttacttctctactctctttggttctttctctcttctcttcttttcttcatcaggggagaagaggaacctttaccatcagcgctgatgggctttcacggtgtgtctcgtgtgtctctggtcgcaagctcccatcgcaccctcgccacccctcaccttgaccgtgtctcctttacagcttggtgtgttcggctgaaggcgtacggcgtgtcacgctaacacccttaacaccaggtaagacttaaagtgtatattatatgtagaagactttaaaaactttgaggatgtacacgttttggctgtgacctacaccgctaggcgctaggccttgaaacgcgaacacaccctcccccatttttcttccgtgtccttcttcttttgacacagctggggggcgatgtgatctttctcacatgcaggggtggagggtagaaaacaaccaccccaccacaaacagaacaccccaccaaacgaacaaaacagggcctagaatcgaccagcagggcaagggcaaggtattcatacccccaacgcatttcaggctgttacagaggcaatcagaggcttacagggaccataggtgaacgggaggcgcgatggcacacaccaaccgcaccgcatccgccgcccaccggcgctggcggcaacgactcatcacccaagcccgacaacaaggccaaaccgaatgtcccttgtgtggagccaccatcacctgggacacacacgacctaccaaccagccccgaagccgaccacatcacacctgtcagcaggggaggactcaacaccctcgacaacggccaaatcatctgcagaacatgcaacagaagcaaaggcaacagaacacaaccaaacattcgattccaacaacaaaccacaaaaacattgattccatggtgacaaaccccacaacccccaccggggacaccccctgcacacccgtgcaagacc

SEQ ID NO: 46 - DNA, 29454 bp, unidentified
  source 1..29454: mol_type = unassigned DNA; note = Bacteriophage of P. acnes
agtgaaatacctcccttttgtggatttatctgtttgtcgactttttgtgttggtggtgagtgttgtgcagcctgagcttcctgggtctcgtgattggtgtggggagacgcttcgctggtggcgtgtgtggggtgaggatagtcgcgcatcgtacgtgtcggatgaggagtggctgtttctcatggatgctgcggtgattcatgattgtgtgtggcgtgagggccgggctgaccttgtggcttcgcttcgtgctcatgtgaaggcttttatgggcatgttggatcgttattcggttgatgtggcgtctggtggccgtggtgggggttctgcggtggcgatgattgaccggtatcggaagcgcaagggggcctgattaggtgtctggtgttgttgggtctcaggtgcctcgtcaccgtgtggctgcggcgtattcggtgactgccggcggggatgctggggaattgggtcgtgcgtatgggttgatgcctgatccgtggcagcagcaggtgttggatgattggcttgctgtcggtggtaatggcaggcttgcttctggtgtgtgtggggtgtttgttccgcggcagaatggcaagaatgctattttggagattgtggagttgtttaaggcgactattcagggtcgccgtattttgcatacggctcacgagttgaagtcggctcgtaaggcgtttatgcgtttgaggtcgttttttgagaatgagcggcagtttcctgacttgtatcgtatggtgaagtcgattcgtgcgacgaatggtcaggaggctattgtgttgcatcatccggattgtgccacgtttgagcgtaagtgtggctgtccgggttggggttcggttgagtttgtggcccgttctcgtggttctgctcgcgggtttacggttgatgatttggtgtgtgatgaggctcaggagttgtcggatgagcagttggaggctttgcttcctaccgtgagcgctgcaccgtctggtgatcctcagcagattttccttggtaccccgccggggcctttggctgacggtagcgtggtgttgcgtcttcgcgggcaggctttgtcgggtggtaaaaggattgcgtggacggagttttcgattcctgacgagacggttccggatgatctatcgaggtcgtggcggaagttggctggggatacgaatcctgcgctgggtcgccgcctgaatttcgggacggtgagcgatgagcatgagtcgatgtcggctgccgggtttgctcgggagaggcttggctggtgggatcgtggccagtcggctacgtctgtgataccggccgataagtgggctcagtctgctgtggatgaggcgagtctggttggcgggaaagtgtttggtatctctttttcgcgatcaggcaatagggttgctttggctggtgccggcaggactgatgctggtgttcatgttgaggttattgatggcctgtcggggacgattgtggatggtgtaggccagctggctgactggttggcgttgcgttggggtgacacggaaaagatcatggttgccggttcgggtgctgtgttgttgcagaaggctttgactgatcgtggtgttccgggtcggggtgttgtggttgccgatactggggtgtatgtggaggcgtgtcaagcctttctggaaggcgtaaggtctgggagtgtttctcatcctcgtgctgattctcgccgtgacatgttggatattgctgtaaggtcggcggttcagaaacataaaggctctgcgtggggttggggttccacatttaaggacggttctgaggttcctttggaggctgtgtcgctggcgtattttggtgcgaaaacagttaaagcgaagcggcgtgagcgtagtggtaggaagcgggtgtctgtggtatgaactcggatgagttggctctgattgagggcatgtttgatcgtattaagagtttgtcttcgtggcattgtcgcattgagggctactatgagggttctagccgggtgcgtgatttgggggtagctattcccccggagttgcagcgtgtgcagactgtggtgtcgtggcctgggattgcggtggatgctttggaggagcgtctggattggctgggctggactaatggtgacggctacggcctggatggtgtgtatgctgcgaatcggcttgctacggcgtcgtgtgatgtgcatttggatgcgctgatttttggtttgtcgtttgtggctatcattcctcatggtgatggttcggtgtcggttcgtccgcagtcaccaaagaattgtactggccggttttctgccgatgggtctcgtctggatgctggccttgtggtgcagcagacgtgtgatcctgaggttgttgaggcggagttgttgcttcctgatgtgattgttcaggttgagcggcggggttcgcgtgaatgggttgaggtggatcgtataccgaatgtgttgggtgctgttccgcttgtgcctattgtgaatcgtcgccgtacttctaggattgatggccgttcggagattacgaggtctattagggcttacacggatgaggctgtgcgcacactgttggggcagtctgtgaatcgtgatttttatgcgtatcctcagcgttgggtgactggcgtgagcgcggatgagttttcgcagcctggctgggtcctgtcgatggcttctgtgtgggctgtcgataaggatgatgatggggacactccgaatgtggggtcgtttcctgtcaattcgcctacaccgtattcggatcagatgagactgttggcgcagttgacggctggtgaggcggctgttccggaacgctatttcgggtttatcacgtctaacccgcctagtggggaggctttggcggccgaggaatctcggcttgtgaagcgtgctgagcggcgccaaacgtcgtttggtcagggctggctgtcggttggtttcctggctgccaagtcgcttgattcttccgttaacgaagctgatttttttggtgatgttggtttgcgttggcgtgatgcatcaacacctactcgggcggctacagcggatgctgtgacgaagctggttggtgccggtattttgcctgctgattctcgcacggtgttggagatgctggggcttgatgatgtgcaggttgaggctgtgatgcggcatcgcgccgaatctgcggatccgttggctgcgcttgctggggctatttcccgtcaaacgaacgaggtttgatggatggcttcgggtgctatgtcgaggctggctgcgactgagtatcagcgtgaggcggtcaggtttgctgggaagtatgcgggctattattctgagcttggccgtttgtggcgtgccggcaggatgagtgacacacagtatgttcgtttgtgtgtggagttggagcgtgccggccatgatggttcggcgtcgttggccgccaggtttgtgtcggattttcggaagcttaacggtgtcgatcctggtttgattgtgtatgacgagtttgatgctgccgcggctttggctaggtcgttttcgactatgaagattatgaatagtgacccggatcgggcgaatgatacgattgatgcgatggcggcgggttttgatcgggctgtcatgaatgctggtcgtgacacggttgagtggtctgcgggtgcgcagggtaggtcgtggcgtcgtgtcacggatggggatccgtgtgctttttgtgccatgttggctacgaggtcggattatacgactaaggaaagggcgctcactactggtcatacgcggcgtcataagcgtggtggtaagcgtccgtttggttcgaagtatcatgatcattgtgggtgtacggtggttgaggttgttggcccttgggaaccgaatagggctgatgccgagtatcagaggacgtatgagaaggctcgcgagtgggttgatgatcatgggttgcagcagtcgcctggcaatattttgaaggctatgcgtactgttggtggcatgagataatttgatgtggtttccggttgtgcgccgccggttatcggtgcacagggttgtctcccgcacgggggtcaacaatgttgtgttgttttccgcaaggagtgtagggttaggctatggccgatcagagtgttgaggaacagaatgttgacaatgatgttgtggagtccggaaagggtgacggcattgttgacacggtgaagggcgatcaaggcaaacaggttgaagatcagtcgaagaatgaaggcgagggtaaatcgccggggactgattggaaggctgaggctcgtaaatgggagtctcgtgcgaaaagtaatttttccgagctggagaagcttcgtacatcgagtgacgattctggatctactattgatgagcttcgccgcaagaatgaggaactcgaagacaggatcaacgggtttgttcttgagggtgtgaagcgtgatgtggctgccgagtgtggcctttcgggtgatgctgtcgcttttctgcacggcgacgatcgtgaagcgctggtggagtctgctaaggctttgaagggtttgatcgaccatagtagtggtggcgcgggtgtgcgccgtcttgcggggagtgcccccgttgatgatgttaaacgacgtgagggtgtcgcgtttgtggatgctcttgtcaataattctaggagatgatttgtgatggctgacgattttctttctgcagggaagcttgagcttcctggttctatgattggtgcggttcgtgaccgtgctatcgattctggtgttttggcgaagctgtcgccggagcagccgactatttttggccctgtgaagggtgccgtgtttagtggtgttcctcgcgctaagattgttggtgagggtgaggttaagccttccgcgtctgttgatgtttcggcgtttactgcgcagcctatcaaggttgtgactcagcagcgtgtttcggacgagtttatgtgggctgatgctgattaccgtctgggtgttttgcaggatctgatttccccggctcttggtgcttcgattggtcgcgctgttgatctgattgctttccatggtattgatccggctacgggtaagcctgctgcggctgtgaagacttcgctggataagacgaagcatgttgttgatgccacggattctgccacgactgatctggtcaaggcggtcggcctgattgctggtgctggtttgcaggttcctaacggtgtcgccctggatccggcgttctcgtttgctctgtcgactgaggtgtatccgaaggggtctccgcttgccggtcagccgatgtatcctgccgccgggttcgctggtttggataattggcgcggcctgaatgttggtgcttcttcgactgtttcgggtgccccggagatgtcgcctgcctctggtgtgaaggctattgttggtgatttctctcgtgtccattgggggttccagcgtaacttcccgatcgagctgatcgagtatggtgacccggatcagactggccgcgaccttaagggccacaatgaggttatggttcgcgccgaggctgtcctgtatgtggctatcgagtcgcttgactcgtttgctgttgtgaaggagaaggcttccccgaagcctaatccgccggccgagaactgatttatttgttgcgataatgttcatgctgtgtgcagggggtggtgttgatgggtatcattttgaggcctgaggatattgagcctttcgccgatattcctaaagataagcttgaggcgatgattgccgatgtggaggctgttgctgtcagtgtcgccccctgtatcgctaaaccggatttcaaatacaaggatgctgctaaggctatcctacgtagggctttgctgcgctggaatgatactggtgtttctgggcaggttcagtatgagtctgcgggcccgtttgctcagactacacggtctagtactcccacgaacttgttgtggccttccgagattgccgcgttgaagaagctgtgtgagggtgatggtggggctggtaaagcgttcactatcacaccgaccatgaggagtagtgtgaatcattctgaggtgtgttccacggtgtggggtgagggttgctcgtgcgggtcgaatattaacggctacgctggccctttgtgggagatatgatatgaccagttttccttacggtgaaacggttgtgatgcttcagccgactgttcgtgtcgatgatttgggcgacaaggttgaggattggggtcatcctgtagaaaccgtgtaccataacgtggctatctatgcttccgtttcgcaggaggatgaggccgcggggcgtgattctgattatgagcattggtcgatgcttttcaagcagcctgttgtgggcgctgattatcgttgtaggtggcgtattcggggtgtggtgtgggaggctgacgggtctcctattgtgtggcatcacccaatgtctggctgggatgctggtacgcaggttaatgtgaagcgtaagaagggctgatggttgtggcacgtgatgtgaatgtgaagcttaatcttcctggtatccgtgaggtgttgaagtcttctggggtgcagggcatgttggcggagcgtggcgagcgtgtcaagcatgcggcctctgctaatgttggcggtaatgcttttgatagggcccagtatcgtgccgggttgtcgtcggaggtgcaggttcaccgtgttgaggctgtcgctaggattggcaccacctataagggtggtaagcgtattgaggcgaagcatggcacgttggctaggtcgattggggctgcgtcgtgatcgtttacggtgatccgcgaatatgggcgaaacgcgtgctcaaggatgatggctggctgtccgatataccgtgtacaggtactgtcccggatgatttcacgggtgacttgatttggttggcgttggatggtggcccgcagttgcatgttcgtgagcgtgtttttttgcgggtgaatgtgttttctgatatgccggatcgtgctatgtctttggcgcgtcgtgttgaggctgtgctggctgatggtgttgatggtgatccggtggtgttttgtaggcgttctactggtcctgatttgttggttgatggtgcacgttttgatgtgtattcgctgtttgagctggtgtgccgtcctgtcgaatccgagtaaacgtatttgttttctatattttgtttttgtttgattatttttgggggttgtgatggctgctacacgtaaagcgtctaatgttcgctctgctgttacgggtgacgtctatattggtaaagctcatgccggtgacactattgatggtgtgaagacggttcctgacggtcttaccgctttagggtatctgtctgatgacgggtttaagattaagccggagcgtaaaacggatgatttgaaggcttggcagaatgcggatgttgttcgcactgtggctacggagtcgtctatcgagatttctttccagctgatcgagtctaagaaggaggttatcgaactgttttggcagtcgaaggttactgccggagccgattcgggttcgttcgatatttctcctggtgccacgacgggtgttcatgccctgttgatggatattattgatggcgatcaggttattcgctactatttccctgaggttgagttgattgatcgtgacgagattaagggtaagaatggcgaggtgtacgggtatggtgtgacgttgaaggcgtatcctgcccagattaataagaagggtgatgcggtgtcgggtcgggggtggatgacggctttaaaagctgatactcctccgactcctcctccggccccgaagcctccgaagcctgagccggatccgaatccgccgtctaataactgatacacatagtttgagggattgttgatagatgagtgacacaggttacacgttgaagattggtgaccgtagctgggtgttggcggatgcggaggaaacggcgcaggctgttcctgcccgcgttttccgtcgtgccgccaggattgcccagtcgggggagtctgcggatttcgcccaggttgaggtgatgttttctatgttggaggctgccgccccagaggatgctgtggaggccttggaggggcttcctatggttcgtgtggccgagattttccgccagtggatggaatataagcctgaaggtaagggtgcctcgctgggggaatagtttggctccacggcctgattgatgattatcgtggggccatcgaatacgatttccgcactaaatttggtgtttctgtttatagtgttggtggcccgcagatgtgttggggtgaggctgtccggctggctggcgtgttgtgtaccgatacgtctagccagttggcggcccacctgaatggttggcagcgcccgtttgagtggtgtgagtgggctgtgctggacatgttggatcattacaggtctgctaatagtgaggggcagccggagcctgtggcgaggcctacggatgagcgtagggcccggtttacgtctgggcaggtggacgatattttggcgcgtgttcgtgccggcggcggggtgtctcgcgagattaatattatggggtgaatagtgtatgtctggtgagattgcttccgcatatgtgtcgttgtatacgaagatgcctggccttaaaagtgatgttggtaaacagctttctggggttatgcctgctgagggtcagcgttcgggtagtctttttgctaagggcatgaagttggctcttggtggcgccgcaatggtgggtgctatcaatgttgctaagaagggcctcaagtcgatttatgatgtgactattggtggcggtatagctagggcgatggctatcgatgaggctcaggctaaactgactggtttgggtcatacgtcttctgacacgtcttcgattatgaattcggctattgaggctgtgactggtacgtcgtatgcgttgggtgatgcggcttctactgctgccgcgttgtctgcttcgggtgtgcagtctggcgggcagatgacggatgtgttgaagactatcgccgatgtgtcttatatttcgggtaagtcgtttcaggatacgggcgctatttttacgtctgtgatggctcgcggtaagttgcagggcgatgacatgttgcagcttacgatggcgggtgttcctgtgctgtctttgcttgccaggcagacgggtaaaacctcggctgaggtgtcgcagatggtgtcgaaggggcagattgattttaacacgtttgcggctgcgatgaagcttggcatgggtggtgctgcgcaggcgtctggtaagacgtttgagggcgctatgaagaatgttaagggcgccttgggctatcttggtgctacggctatggccccgtttcttaacgggttgaggcagatttttgttgcgttgaatccggttattaagtcggtcacggattcggtgaagccgatgtttgctgccgtcgatgctggtattcagcgtatgatgccgtctattttggcgtggattaatcgtatgccgggcatgattacgagaatgaatgcacagatgcgcgccaaggtggagcagctgaagagcgtttttgcgagaatgcatttgcctgtcccgaaggtgaatttgggtgccatgtttgcgggtggcacagcagtgtttggtgttgtggctgcgggtgtggggaagcttgttgcagggtttgccccgttggcggtgtcgttgaagaatcttctgccgtcgtttggtgctttgaagggtgccgctggcgggcttggcggcgtgtttcgcgccctgggcggccctgtcggtattgtgatcggcttgtttgctgccatgtttgcgacgaacgcccagttccgtgccgcggtgatgcagcttgtggctgtggtgggccaggctttggggcagattatggccgctattcagcccttgtttggtttagtggccggtgttgtggcacagttggcgccagtgttcggccagattatcggtatggttgccggtttggctgcccagattgtgcctttgattagtatgcttgtcgcccggctggttcctgtgattacgcagattattggtgcggtgactcaggttgctgcaatgttgttgccggcgttgatgccggtgcttcaggcggttgtggctgtgatacggcaggttgttggtgttgtgatgcagcttgtgcctgtgttgatgcctgtgattcaacagattttgggtgctgtgatgtctgtgttgccgccgattattggtttgatacggtcgctgataccggtcatcatgtctgttatgcgcgtagtggtgcaggttgtttcggttgtgttgcaggtggttgcccgtattattccggttgtgatgccgattgttacggctgtgatcgggtttgttgcacgtattttgggtgctattgtgtcggctgccgccaggattattggggctgttgcccgtgttgtcggatgggttgtgggccatttcgtgtcgggtttggcgcgtatgggttcggttattcaggctggctggaatcatattagggcttttacgtctgcgtttattaacggtttcaagtcgatcatttctggcggcgtgaacgcggttgtcgggttttttacgcggcttggtttgtcggttgcctcccatgtgaggtctggttttaacgcggcacgtggtgctgtttcttctgcgatgaatgctatccgtagtgtggtgtcttcggtggcgtctgctgttggcgggtttttcgggtcgatggcgtctagggttcggaatggtgctgtgcgcgggtttaacggggcacggagtgcggcctcttctgctatgcatgctatggggtctgccgtgtctaacggtgtgcatagtgtactgggttttttccggaatctgcctggcaatattcggcatgctctcggcaatatggggtccctgttggtgtctgctggccgtgacgtggtgtctggtttgggtaatggtattcggaatgctttgagtggcctgctggatactgtgcgtaatatgggttcccaggtggctaacgctgcgaagtctgtgttgggtattcattccccgtcgagggtgtttcgtgatcaggttggccgtcaggttgttgccggtttggctgaggggatcaccgggaatgctggtttggcgttggatgcgatgtcgggtgttgcttcgcagcttccggatgctgtggatgcccggtttggtgtgcgatcgtctgtgggctcgtttaccccgtacgaccggtatcggcgtgctcagggtgagagtgttgtggtgaatgtgaatggcccgacgtatggtgatcctgccgagtttgcgaagcggattgagcgtcagcagcgtgacgctttgaacgcgttggcttatatgtgagtaaaggggtatgcatgtttattcctgacccgtctgatcgttctggtttgactgtgacatggtctatggatccgcggtttggtgatgagcgtgtgcttcatttgacggattatacggggtcgtctccggtgatgttgttgaatgattcgttgcgcggtttgggtgttcctgaggttgagcatttttctcaaactcatgttggggtgcacgggtcggagtggcgcgggtttaatgtgaagcctcgcgaggtgacgttgccggtgttggtgtcgggtgttgacccggatccggtgggcgggtttcgtgacggttttttgaaagcctatgacgagttgtggtctgcgtttcctcctggcgaggagggggagctgtctgtgaagactcctgccggtgtagagcgtgtgttgaagtgccggtttgattcggtggatgacacgtttacggttgatccggttaatcgtggctatgcgcgttatgtgcttcatttgacggcctatgacccgttttggtatggggatgagcaaaagtttcgtttcagtaacgcaaagttgcaggattggttgggtggcggccctgtcggcaaaaacgggactgcttttccggtggtgttgacgcctggtgttggttcgggttgggataacctgtcgaataagggtgatgtgcctgcgtggcctgtgattcgcgttgaggggccgttggattcgtggtcggtgcagattgatggtttgcgtgtgtcttcggactatcctgtcgaggagtttgattggatcactattgatacggatcctcgtaagcagtctgcgttgttgaacgggtttgaggatgtgatggatcgcctggatgagtgggagtttgcgccgattccgcctggcggttctaagagtgtgaatattgagatggttggtttgggtgccattgttgtgtcggtgcagtacaggtttttgagggcgtggtgaattgttgtggctggtcttgtcccgcagataacattgtttacgccagactatcatcgtgtggcgcctatcaatttttttgagtcgctaaaattgtcgttgaagtggaatggtttgtcgacgctggagttggtggtgtctggtgatcattcgaggcttgacgggttgacgaggccgggtgcacgcctggttgttgattatggtggtggccagattttttctgggcctgtgcgtaaagtgcacggggttgggcctcggcggtcttcccgtgtgactatcacttgtgaggatgatattcgcctgttgtggcgtatgttgatgtggcctgttaattatcgccccggtatggtgggttctgagtggcgtgcagaccgggattatgcccactattctggtgcagccgagtctattgctaagcaggtgttgggggataatgcttggcgttttccgcctggtttgttcatgatagaggatgagaagcgtggccgctatattaaggattttcaggtgcggtttcacgtgtttgcggacaagttgttgcctgtcctgtcgtgggctcggatgactgtttcggtgaaccagtttgagaatgcgaagacggatcagcgggggctggtgtttgattgtgttcctgctgtgacgcgtagccatgtgttgacgtccgagtcgggttcgattgtgtcgtgggagtatgtgagggatgcccccaaggctacgtcggtggttgttggtggccgcggcgagggtcgggatcggctgttttgtgaggatgttgattcgatggccgagggggactggtttgatcgtgtcgaggtgtttaaggatgcccgtaacactgattcggataaggtgtctctttacgatgaggcggagcaggtgttgtcggaatcacaggccacgtctggttttaagatcgagttggccgagtcggatgtgttgcgttttgggcccggcaatctgatgcctggggatttgatttatgttgatgtgggttcggggcctattgcggagattgttcggcagattgatgtggagtgtgattcgcctggtgacggctggacgaaggtgacaccggttgcgggggattatgaggataatccgtcggcgttgctagcgcggcgtgttgccggtttggctgccggtgtgcgggatttgcaaaagttttaaaaaagctcaacggattggggtttgttgtgggtattgtgtgcaagggttttgatggtgtgttgaccgagtatgattgggctcaaatgtctggtctgatgggtaatatgccgtcggtgaaaggtccggacgattttcgtgtcggcacgacgattcagggtgccacagtgttgtgtgaggttttgccggggcaagcgtgggctcacggggtgatgtgtacttcgaatagtgttgagacggtgacgggccagctgccgggtcctggcgagacgagatacgactatgttgttctgtcgcgggattgggagcagaatacggcccggttggagattgttcctggggggcgtgcggagcgtgcccgtgacgtgttgcgtgccgagcctggcgtgtaccatcagcaactgttggctaccctggtgttgtcgtctaacgggttgcagcagcagctggataggcgtgccgtggcggctagggtggcgtttggggagtctgctgcgtgtgaccctacccctgtggagggtgaccgggtgatggttccttcgggggctgtgtgggctaaccatgctggcgagtggaggctgttgtctccgcgtatcgagacgggttcgaagtcgatcatgtttggtggatctaatgtgtatgcttacacgatcccgtttgatcgccagtttactagtccgcctgttgtggtggcgtctatggggaccgcggctgggggtacgacacagattgatgtgaaagcctacaatattactagtaaggattttggtttggcgtttatcacgaatgacgggtctaaaccgaatggtgtgcccgcggtggctaactggatagctgtgggcgtgtgacggtacaggcgttgtggtggctggtgtgatgttgggggggctgccgtgtcgtggatgactcctgcattggtggcttctatttgtaccgcgttggccacggttttgggttctgttcaggctatcacatcccggtctagaaagcgtttgcgaaggttgtctgcgcaggtggatgctttggaagagtatacgtggggtgtgcggcgtgaggttcgccggtttaacgccaggcttcctgacggggttgatccgcttgtgttgcctgagccgcctggtttcctatcggatgatgttgggggtgagtgatgagggagttggaggaggagaagcggcagcgtcgctcgtttgagagggcttccctgctgttgttgtttttgtcgcttgtgctgttgattgtggttgctgggggtgctttgcgtttcggggctgtatcctctgaacgggattctgagcaggcgagggcccagtcgaatggtacagcggccaggggtttagccagccgtgtgcggcaggtgtgtgcccatggtgggatggagtcggtacggcttcaccggtctggtttgtgtgtggatgctgtgcgtacggagcggagtgttcagggtgtgccgggcccggctggtgagcgcggcccgcaaggccctgcaggtgctgatgggcgtgacggtgttaatggttcgtctgggctggttggccctgttggtccgcagggttctcccggcttgaatggcgtgaaaggtcctgacgggttgcctggtgcaaatggatcggatggccgtgatggtgttccgggccgtgcaggtgttgacggcgctgatggtcgggatggttcggctggtgagcgcggtgatgtgggtccttcaggtcctgccggcccgcaaggtgcacagggggaacggggtgagcgtggccccgtcggtgcgaacggatccgatggtaaagatggtaaggatgggcgctcggtggtgtctgtgtactgttctgatggtctcctggttgtgaaatatagtgacggtgtggcttctacaatatcgggctcggtggcctgccagggtgtgaaaccgtcgcctatggtgactatatcatcccacaaatagaaaggagtggctgtgatggtagtgtttggtggtggtgtgtggtgaggtttatcccagcagcgcaccattctgccggttcgaatagtccggtgaatagggttgtgattcatgcgacgtgcccggatgtggggtttccgtccgcctcacgtagggggagggctgtttctacggcaaactattttgcttccccatcgtctgggggttctgcccattatgtgtgcgatattagtgagacggtgcaatgtctgtctgagtctacgattggttggcatgccccgcctaaccctcatagtttgggtatagagatttgcgcggatggtggctcgcacgcctcgttcagggtgccggggcatgcttacactcgtgagcagtggcttgaccctcgcgtgtggcccgcggtggagcgtgccgcgatcctgtgtagacgtttgtgtgacaaatataatgttccgaaaaggaagcttagtgcagccgatttgaaggctggcaggcggggtgtttgcggccacgtggatgttacggatgcgtggcatcagtcggatcatgacgatcctgggccgtggtttccgtgggacaaatttatggccgtagtctgcggcggtagtggtagtgaggagttaactgtggctgatgtgaaagccttgcatgatcagattaaacaattgtctgcccagcttactggttcggtgaataagctgcaccatgatgttggtgtggtacaggtacagaatggtgatttgggtaaacgtgttgatgccttgtcgtgggtgaagaatccggtgacggggaagttgtggcgcacgaaggatgctttgtggagtgtctggtattacgtgttggagtgtcgcagccgcattgacaggcttgagtctactgttaacggtttgaaaaagtgatggtggtttgttgtgggtaaacagttttggttaggtttactggagcgggccctgaaaacttttattcaaacgtttgttgccgtgctcggtgttactgcgggtgtcacgtatactgcggagtcgtttcgcggtttgccgtgggagtcggcgttgatcacagccacggttgctgcggtgttgtcggttgctacttcgtttggtaatccgacgtttgtggctggtaagccgaagactacggttgtggataccgggcttgttccacccgatgataccggtttgatagaaccgcatgcggtggatgtgtcggatcctggcatgattgagccgatggatgatgcggatgttgccggctatgtgccgaagcgggctgccgagtcggaggttggcacagtagagtctactgttgcataattgaatatgtgtgtgccccagcggtgctgccacgattgtgtggtggttgccgctggggcacactttttgtttatgcgatatggctatgattcgttgctgtcgatggtgtcttcgagcatctgatacaggtggaggcaggtgcagatggtttcgctggcctggtcgagaacgtttcggccgataacgtttttgtggttgtcgcggtggcggatgatagcccacatgatctcgtcggctgccgcctgtaatagttttgcctggtatgcgattccggcgagccagtctagtgcttcctggcttgcctgtgtgtcgtctggaataccacgggtgttgctgttgcttgggtgtccttcactgtcgcatagccacaggatttcgctgcactcgtctagcgtgtcctggtcgatagcgagatcgtcgaggctgacattgttgacggtaaggttcacgttgtcgagggagatgggtacaccgtactggttttcgacactgtcaacaatgttttgtagttgttgcatgttggtgggctgttgttggatgatacggtgtaccgctgctttgagggcagtgtaggggatattgtgtgtgttgttcatggttttatttcatccctgtgctgtcgtcgttatcgtctggatagtatctactgtttgcgtaccctgttagggtgatcaatgtttggtctgcccactgtttcacggtttgccgggttacccctaatcgttgggctgctaccgaataggtttgatcatacccgtatacttcccggaatgctgccaaccgtgctaggtgttttcgctgtttggatggctggcaggtgagggtgtagtcgtcgatggccagctggaggtcgatcatggagacgatgttgttgccgtgatgctggggggcggttggtgggggtggcataccgggttctactgatggtttccatgggccgccgttccagatccattgggcggcttggataatatctgcggtggtgtaagtccggttcactggtcaccccctgaacaggttgtcgaggttgtctgggttactggtgttggtggtgtcgaatcgtcccacacagtggcagtagtcgtacatgagtttgataatgtgttggtggtcgccgaggtaggtgttgccactaatactgtaggtggctgtgccgtctttgccgataatgtatttggcggtgatggtttctggtgtttcggtgttggtgatgattgctgttgtggtggtgcctacggtttgtagcctggtggtttgggttccgtcgtcgagggtggtggtaaccataattggggttttccttaaatgcttgtctggttgtcggctagatgaataatatcggataaaggtttcggctggtctaggtgctgtaccgctttgttggctaaacgtttggctaccctgtaacacattttggtatagtgtttgttgtctaggttgtggtattgttcccgcaccgcaatatatagtagggagtcttggtacaggtcgtctgcactgattgcggggtagtgggtggctactttgatgcatgaccggttgagtgtgcgaagatgatggtcggtggtccatccccacgatgcggtggtggcccggtctgcttttgttggtcgtctactcatggcactatttcatctcgctatctggtagttgtttggtgttttatggttgatagtgtagcacacgagtccggggttgccggtggtgcccgtcttgtgccggtaccatgtggattcgccttccatggatgggcattggatgaaggtgcgttgtccttgctcggagatttctaggtggtgtcggtgcccggccatgaggatgtgggatgtggttccgttgtggaattcttgtccgcgccaccaatcatagtgtttgccggtgcgccattggtgtccgtgggcgtgcaggatttgtgtgcctgccacattgacggtggtggtcatttcgtctcggctggggaagtggaagtgtaggttggggtattggttgttgagttggtaggcttcggcgatggcgcggcagcagtccacgtcgaaggagtcgtcgtaggtggtgacgcctttgccgaagcgcacggcttcaccgtggttgccggggatggatgtgaccgttaggttggcgcagtggtcgaattggtggatgagttgcatcatggccatgcgggtgagccggatttgttcggtgaggggtgtttgtgtgcgccaggcgttgttgcctccttgtgacacgtatccttcgatcatgtcgccgaggaatgcgatgtggactcgttgcggtttgcctgcctgttgccagtagtgttttgcgactatgagggagtgcaaatagtcgtcggcgaagtgtgctgtttctcctccggggatgcctttgccgatttggaagtctcctgccccgatgacgaaggccgcagtgctgtagtcggtgcgggtgtcttgttcgggttttggtggctgccattcggctagtttatctacgagttcgtctacagggtaggggtttgttgcgggttggtggtcgatgattttttgtacggatcggccggtttctccgttcggtaaggtccattcggagatgcgtgtgcggcgtacagtaccattggctagattgtcgtcgatggtgtcgatggcgttgtcgtggttggctagctgtgtgagtagccggtctatattgtctatcactgggtatcctcttcctcgtgtggggtggtgttggcttgtttgcggcgatagtctttaataacggtggcggagatggggtatccggcttgggtgagctgttttgctagccatgaggcggggatggttttgtcggcgaggacgtctgcggctttgttgccgtagcgttggataagggtttcagttttggttgccatgatatcctaggggttgtgtggcgggttgccatcctgtgcggcagtcgccgtcgtgtcctggcttacgggtgcaccatgtgatggttccgtctgtgtggtggagttttttgccgcacatgacgttttgtagatgctccggcagctggtcggtgttgttgctggtttgtatgtcgaagagtgttttctggttggtgaaatgctctgacacggtgccattatgcacgggtagtatccatgttttccattgctgttgtagcctggtgttccagtggaattgtttggcggcgttttcggcctgttttaaggttttgtagtagccgactagtatgcgctggtgttcactgtcgggtgggttttggcctcgccaatattgtgccgccacggcgtagcggttgctggctgtgaaggcgtcccagcagtattcgataatgtgttgtagtgcactatcgggcatgtcttgtatttggttttcgttaagccattcttcaacaaggatgttgtgtatggcgcgtttgtctttgatggttggtttgaacgagatgctcacgatagtaccggctggtcgtcttgcatgaactggttgaaggtgttgtttccggcgtgttgggcttgtgtgatgtcctggtcggtccagtcggggtgttgctgtttcagatagtgccagtggcacgcattgtaggtttcgtcttgtagccgtgtgagatggttttcggtgatgatttgtttccacattgtccatgacacgtcgagccggttgaggatttcgagggctgggatgttaaattggttgaggaagagtatttcgtgggtgtagtagtttttctcgtaggcgtcccatccgcttcggtgcctgttgggctggtttttggggtaggcttcccggcatactttgtgcaaatgtttggccatgtcgtcgggtagtttaatgtcggggttggcgcggatcatggatcgcataccatcataggtggtgccccaggtgtgcataatgtaggtggggttttctccatcagcccatttttctgcacagatggcgaggcggatgcgcctcctggctgcttggctaatgttgcgccggttggggatggggcacgtgtctaggggatccatgatgttttagtgtacctttctttgttggggttgcttgtgtggttttattgtagcactgtgttgagtgcttgtgtcaaccctgttttgccggcctgaaggtaggtgtctgtgacatcccccagggtgaggggcacgtgtacggcttgggggagtgctgtttggagggtttgggccatcttgtctcccgcggggtcgggatcggaccagatgtaaacatggtcgtagccttcgaagaatttggtccaaaagttttgccacgaggttgcgccgggtatggcgacggccgaccatccgcattgttcgaggatcatggagtcgaattcgccttcgcaaatgtgcatttcggctgccgggttggccatggcggccatgttgtagatggagcccgtgtctccggccggggttaagtatttggggtggttgtgttctttgcagtcgtgtgggagtgagcagcggaaacgcatttttcttatttcggctggccgcccccaaacggggtacatgtaggggatggtgatgcactggttgtagtcttcgtggcctgggatggggtcattgtcgatgtatccaaggtggtggtagcgggctgtttcttcgctgatgcctcttgctgagagaaggtcgagaatgttttcgaggtgggtttcgtagagggccgaggctttctggattcggcggcgttccgcaatgttgtatgggcgtatgctgtcgtacattcgggtttctttcttcgagttgttgttgtagtttggcgaggccgcctccgacaccgcatgtgtggcagtaccagacgcccttgtcgaggttgatgctcatggagggttggtggtcgtcgtggaacgggcagaggatgtgttgctcgttcctggacgggttgtagcgtatccggtaggtgtcgaggaggcggcaggtgtcagaggtgtgggaggagttctgcgagggttgataccacataggcttcgctccatggcttgttgcgctgtttcatgaccactaacccgattgtggatttgtcaaccaggttgcggtgggtttcatagttgcgcgcctcccggctggcttgtttcacgaattgggcgagatgttgctgtcctgctttcgcttcgatcacataggttttgtggccggttgtgaggatgaggtcgccttcgtcttcgtggccgttgaggtgtagccgttcgatgtcgtgtccgatgtcacgtagctggtgcaataatcgtgtttcccactcggcaccggcccggcggttgcgtgattgctgtgtagccatcataatcctttgtgtgttgtggccatgttccatggctgtttttcggctagtggtccgaagaatgtgtattcggggtaggctcgtagccgttcgtatcgggtgccgtctgggctggatttgcctgtgcgctgtttcaacactgcgatgcgcgcctctgccggtatcgatagcccgttgccgttatcctcgccaccatacaatgagactccgaggatgagttgtggtttctcggatagcccgtttttgatctctcgtctggcgggcgggtgttcgatgtcggagccggttttgtcggttgcgtggtgtgtgacgataatggtggagccagtatccctacctaatgctgtgatccattgcatggcttcttgctgtgcctggtagtcactctcgcagtcttggatgtccatcaggttgtcgataacaatgagtggtgggaaggtgttccacatttccatgtaggcttgcagctccatggtgatgtctgtccatgtgatgggtgactggaatgagaatgtgatgtgttggccgtggtggatgctgcctcgatagtattctggcccgtagtcgtcgatgttgtgttgtatttgggcggttgtgtgttgggtgttgagggatatgattcgtgtggaggcctcccagggtgtcatgtcccctgaaatatatagggcgggctggttgagcatcgcggtgatgaacattgctagcccggatttttggctgccggaccgccccgcaatcatgacgagatcccctttgtggatgtgcatgtcttggttgcggtagaggggttctagttgtggtatacggggcagctcagcagcggtttgggaggctctctcgaaggatcgttgtagagagagcatcgggaccttaatctatctatctgttacggtttggatgaatattggcggtcagatggagtcgatatctacatcatcgctgccggtggtgttgggctggctgtctcgctggtcaacgtaggcggctacaaggtcgtagatggcgtcgtctaggggtttgaggatgacagcgttgaacccgtttttagtgcgcactgtggcgagtttgaaggcctgctcctcgccgaggtaggtttcgagttcgcggatcatggagtgtgggcggtcgttgttgcctcgcgctttttcgatgatagcgttggggatggtttctggggtgccgttgttgaggtcgtcgagggtgtggaagatagtaacgtcggcgtaaatacggtctgcgacctgtccgccgtagccttcggtgttgtgttccacgtcgtggattttgaaggcgatggcggtggcgtcctggtttttggacgggttgaagaaggtgctgctgttgctgttgttgcggtagttggcgagtcccataacttttgtccttttgctgtttgtgttgttttgttgtcttatattggtttatcgggtgaggctgtttcgtttagtgcggaacgcctcagacacgtcactgttactggtgatgatctttttgtactgtttcaagaggtctgctaattgtgctttactggtggctttgttgatcctgtcgatgataatgtcgttttcttgattggcgattttgttgacgtagtctttggctgctttgtcgtatcggtcttggaggatgatggatgcgctcgctacgagcgttgccagatcccagtctttggagactgtttcgtctttgagtccgcctagcaggtcgatgatggcctgttttgtctgctctgctgtgtctcctcggatgaccgcccatggtgcagcatagtctccaccatatttgagtgtgatagtgagtcgatcattgtctgtggtgcgctcttctgtcacttgttttccttttctttattgtctgcttggggtggctgtacggtggattctaccgggtatctgtaggcgtctttcccgtctaccgcccagcaggcgtcctgtacggggcatcctttacagagtgctgtaacatgtgggacgaagatgcctttgctgattcctttcattgcttgactgtacatggatgatacatgccggtaggtattgttgtcaagatcgtacagttcggttgctgtgccctgagtttgcgatgtggtgttgtttcggctgctggcgggtgtccaaaacatgcctttcgtcacgttgatgtcgtgttggttgagcatgtaccggtaggtgtgcaactgcatggcatcaacagggaggcgacccgttttgaggtcgagaataaacgtctcaccagtgtcggtgtcggtgaagatacggtcgatgtagccaacaatctttgtgccgtcctggagggtggtttcgactgggtattcgatgcctggctggccgtcgagtattgctgtgtggtattgtggatagtttgtgcgccactgtttccacctgtcgacgaagatggggccatagatcatccaccagtcgtagtctttcttgtgtggcccgcctgactcgcacatgtttttgcacactctgccggagggtttgatttctgtgccttcggattcgacgagggcaacttgggtgtcgaaaacgtttttgaaggatgagagtttgtctggcagtgcagggtattcgtcggggttgtacaggtggaggtcgtactgttcggtgatgtggtgtatggcgcttccggcgatggttgcgtaccaggtgtggtgctgtgcatgatagccgtgggataggcgccatttttctccgcattcggcccactgggtgagtgaactgtaggagatgtggcctggatggttgatggttttcggatattgtgctagaggcattacttgtcgcttttgttccatgggttgcgggtgtcttggccggcattgtgttgctggtaggcgaggagtgctaggcagtgccaggctgcgtgtgccaggtgtggcaggtgtgattcatcgtcgaggttgtttccttgctgccaggatagcacatggcggtagagggcgtcgacactgtgacaccaggggtatcctccggtccagttgttgtcgccgtatttggtggcaccgtagcctgctacttcgcctagggcgtgcaaggctacggggtcaatgagggagagcctgcagagtttgagttcttttcgggcacctgtgtcggggtcggtgtacatgcgggtgggctcatccatggggggtgtgtgcctttcttggtttgggttactggttgttgtcgtgggctagtgctactgcgagaataatgatggcgagggtttcagcaataagtatgggtgttgtgatcatttgctgtctcggggattgttggtgagggttgaggcacccaggagggtggcgagggcgcatgcggcgataatggcgagggctgccttgtggggggtgccggttgcgtacatccatgtgatgatgccgccttggatccatgccagtgtggtgaagaaggtttcgtaactgtgcaactcgatactgttgggtgtgttcatgctcgctcctgaagaatggtgttgatggttttgtaaatgttgtacaggtcggtttcgatagataacagttggtggatttggtggtcgaggttgatatctgggttgagggtgttgatgcgggatgcgatgtcggtggctgtgcgtagtgtgccgccggtgtggtgaataatgtgtgcggtgtcggcgagtccggtggtgacagcatagtgggagaggagaggcatagcggggatgctccttggcgggttactgttgcgggttgatgttgaggtcggtgacgtgcgggtggtcttctgttcctgtgatgaggcagtggacggtgactgggagtttggatgcgccgggctgtttcatggttgcgccgtagacgatgctgaacgtgtctttaccgatggttttgtggagttggaggtcgatgtcggggttgccgttccagttgacgccgtgtgcggcggccttctgttcggctttacggttgcaggtgtgtgctgcggtgatcatggtgagaccctgcgcggtttcttcaccccttgcttgggcttgcttgtgggttttggcttgttcggcttgtagggagcgggtggcggctgcctgccgtgccgctttctcggctttgcgctgttgggcggtttttggtgtccattctgtgttggctgtggttacctgtggtgcgggttgtgatgcgagtggggggttgtcgtcgggggctgggaggaaggatgcggcggcgatgatggcggctgtgattccggcgatggtgtagccgtttttcttgttcatgactgttatcccctttccggggtgttgttcgttgctgacatgattgatacttccagacggggctatgactgtcaaggtgtcgctcagtttgtgtgagcgatccttgtgtggctgggggttatcgggcgaacagggtgagtaggtgtcctaagttgatgcgactcacgttccagtagagttgcgtggcttcaccgccagtgagcggcttccacttgttgtggctgaacactgtaccgtcggatgctatgaacgtgtcggggcgtagcttgtgaagttcagtctctacgctctgccggtaggcttcggcgaggccctcaaaatccatgtggtcaccggagaggttttcgaggcgtgtcaggtcgaagggtgtggggcagtcgtagctggcgggggtgtagagctgggtgaagtggtcggcgatcttttgcatcatgattccttttctagtgtggtgggttaatagttttatcgggtggatgcgacaaggatggcgtctatgtcgatcatgtcgatgagatcgtggagttcctcggcctcattctcagataggtggcgccagtcgtagtcgccgtacacggcgccgtcgagggtgacagtccacaggggccggatgagccgtatggcttcttgtactttggcgtggtacatgcggcgcaccatatccagatcgatgtcgtctgaatggtttccggtgaggctgtggagactgagggggtcgatttctgtctgctggtagaggctggtgaaggatggggtgatgagtgtgccatccatgggggggtgctcctttctggattgtttgggttggttgttgtggtttctaggatgtgtaggttgcgacccacagtcaaggctgcgctcaatccgaatgagcgtttagcgtgtgtggcatgggatgtggcgtatctcacttaagccttccttgcctctctaggcgtctcaaatcttctgggggtaggattatatagggttgaccctgctgatcgattctagagcccttctagggcctctcgggggtatgtctgagtgatgacgggtgtggcagatgatctagcgagtcaaggtgccgagcttagacataaaatctatcatctaggtgtgtgagatgtatcacatcctcctggcttggtgtgcactttcaaggctactctgtcgatctgacgtggagggtgtagcccagaaataccgtttaaagccactgggagacgcctagaagcgccttacggggtgggggctaggtatttatacccccagcatattctgatcgattctagacgcctacagaagcctggtacacgatcagctatccagacgcagaccatcagcccctatcccgcttagctaagcctgcactatgtggacattgttggatactgtagaggaaagaaggacacggtaaaggaaagagggggaatcagtcttagggtcttaggtacttcagttcaccttaggggcttagcgctgagcacttagcgctaagcccctcaagggctcggcatcagcctgacaggcttagcccatactgcacagccctgaaaggagtacacgccatcagggaaggcttgagagtacgaggagcctcagcgacgagtactcgaaagcctgagggaacacctttagcactgatgggcctagcgcgttcggaaagaacacagaagtaaagtgtgacagctgtccgggagtgaaccccgttctggctaggggtttcagtcttaactacctgtaaaggttacaagactctaagaaaatttaagaaaattcttaagaagaaagttgtgttgttatcccccaaaaaacacccgtttacacccctcaaacccgcctatagagccaaatccgccagtttgactcgtcccaggtggcgtatgctaggctggacaggtagccagctggacgcgaggccagaaagtgctgacgcacttcccgacctcgcttaccatcagtctaccaaacactttaaagcttcaaggctaagccactcagtgctaagcccttaagacctcaacgcttagcaccgagcccttgaggggctcagcattagcactaaggcttaaacacttaataatttaagtaaacataaaagcttttaagacttaaagtaaatatataaccttaacagttaaacgtttaaagctttaaaccttaacacctaagttaggtataaaaccttaaaggcttagcacttaaggatataaacttaacatcagtgtttaagactttaaaacttaaagtaactataagacttaaagacttataagctttaatacttatataataataaagtttaagactgatggttaactttaagtgtttaaagtcttatagttactttaagttttaaagcttataagttataaaagttttagaagagctaaggggttaacttctttacttctctactctctttggttctttctctcttctcttcttttcttcatcaggggagaagaggaacctttaccatcagcgctgatgggctttcacggtgtgtctcgtgtgtctctggtcgcaagctcccatcgcaccctcgccacccctcaccttgaccgtgtctcctttacagcttggtgtgttcggctgaaggcgtacggcgtgtcacgctaacacccttaacaccaggtaagacttaaagtgtatattatatgtagaagactttaaaaactttgaggatgtacacgttttggctgtgacctacaccgctaggcgctaggccttgaaacgcgaacacaccctcccccatttttcttccgtgtccttcttcttttgacacagctggggggcgatgtgatctttctcacatgcaggggtggagggtagaaaacaaccaccccaccacaaacagaacaccccaccaaacgaacaaaacagggcctagaatcgaccagcagggcaagggcaaggtattcatacccccaacgcatttcaggctgttacagaggcaatcagaggcttacagggaccataggtgaacgggaggcgcgatggcacacaccaaccgcaccgcatccgccgcccaccggcgctggcggcaacgactcatcacccaagcccgacaacaaggccaaaccgaatgtcccttgtgtggagccaccatcacctgggacacacacgacctaccaaccagccccgaagccgaccacatcacacctgtcagcaggggaggactcaacaccctcgacaacggccaaatcatctgcagaacatgcaacagaagcaaaggcaacagaacacaaccaaacattcgattccaacaacaaaccacaaaaacattgattccatggtgacaaaccccacaacccccaccggggacaccccctgcacacccgtgcaagacc

SEQ ID NO: 47 - DNA, 29491 bp, unidentified
  source 1..29491: mol_type = unassigned DNA; note = Bacteriophage of P. acnes
agtgaaatacctcccttttttggttttgtctgtttgtcgactttttgtgttggtggtgagtgttgtgcagcctgagcttcctggtagtcgtgattggtgtggggagacgcgtcgttggtggcgtgtgtggggtgaggatagtcgcgcgccgtatgtgtctgatgaggagtggttgtttctcatggatgctgcggtgattcatgattgtgtgtggcgtgagggtcgcgcggatttggtggcttcgcttcgtgctcatgtgaaggcttttatgggcatgttggatcgttattcggttgatgtggcgtctggtggccggggtgggggttctgcggtggcgatgattgaccggtataggaagcgcaagggggcctgattaggtgtctggtgttgtgggttctcaggttcctcgtcatcgtgtggctgcggcgtattcggtgtctgctggcggtgatgctggggagttgggtcgtgcgtatgggttgacgcctgatccgtggcagcagcaggtgttggatgattggcttgctgttggtagcaatggcaggcttgcttcgggtgtgtgtggggtgtttgtgcctcgccagaatggcaagaacgcgatccttgaggttgtggagttgtttaaggcgactattcagggtcgccgtattttgcatacggctcacgagttgaagtcggctcgtaaggcgtttatgcggttgaggtcgttttttgagaatgagcggcagtttcctgacttgtatcgtatggtgaagtcgattcgggcgacgaatggtcaggaggctattgtgttgcatcacccggattgtgccacgtttgagaagaagtgtggctgtccgggttggggttcggttgagtttgtggcccgttctcggggttcggctcgcgggtttacggttgatgatttggtgtgtgatgaggctcaggagttgtcggatgagcagttggaggcgttgcttcctacagtaagcgctgccccgtctggtgatccgcagcagattttccttggcacgccgcctgggccgttggcggatggttcggttgtgttgcgtttgcgtgggcaggctttgtcgggtggtaaaaggtttgcgtggacggagttttcgattcctgacgagtctgatccggatgatgtgtcacgccagtggcggaagcttgcgggggatacgaatccggcgttgggtcgccgcctgaatttcgggaccgtaagcgatgagcatgagtcgatgtctgctgccgggtttgctcgggagcggcttggatggtgggatcgtggccagtctgctgcgtctgtgattccggcggataagtgggctcagtctgctgtggatgaggcgagtctggttggcgggaaagtgtttggtgtctcgttttctcgttcgggggatcgtgtcgctttggcgggtgccggccggactgatgctggggttcatgttgaggttattgatgggctgtcgggaacgattgttgatggtgtgggccggttggcggactggttggcggttcgttggggtgatactggccggatcatggttgccgggtctggtgcggtgttgttgcagaaggcgttgacggatcgtggtgttccgggccgtggcgtggtggttgccgatactggcatctatgtggaggcgtgtcaagccttcctggaaggtgtaaggtctgggaatgtttctcatcctcgtgctgattcgaggcgtgacatgttggatattgctgtgaggtcggcggttcagaaaaagaaaggctctgcgtggggttggggttcctcgtttaaggatggttctgaggttcctttggaggctgtgtctttggcgtttttgggggctaaacgtgttcgtcgtggccgtcgggatcgtagtggtaggaagcgggtgtctgtggtatgaacgtggacgagttggctctgattgagggcatgtacgatcgtatccaaaggttgtcttcgtggcattgtcgtattgagggctactatgagggttctagccgggtgcgtgatttgggggtggctattcctccggagttgcagcgtgtgcagactgtggtgtcgtggcctggtatagctgtggatgctttggaggagcgtctggattggctgggctggactaatggtgacggctacggcctggatggtgtgtatgctgcgaatcggcttgctacggcgtcgtgtgatgtgcatttggatgcgctgatttttggtttgtcgtttgtggctgttattccccaggatgatgggtcggtgttggttcgtccgcagtcaccaaagaattgtactggccggttttcggctgacggttctcgtttggatgcgggtttggtggtgcagcagacgtgtgatcctgaggttgttgaggcggagttgttgctgcctgatgtgattgttcaggtggagcggcgtgggtctcgtgagtgggttgagacgggccgtataccgaatgtgttgggtgctgttccgttggtgcctgttgtgaatcgtcgccgtacgtcgaggattgatggccgttcggagatcactcggtcgattcgtgcttacacggatgaggctgttcgcacactgttggggcagtctgtgaatcgtgacttctatgcgtatcctcagcgttgggtgactggcgtgagcgcggatgagttttcgcaacctggctgggtgttgtcgatggcttctgtgtgggctgtggataaggatgatgatggtgacaccccgaatgtggggtcgtttcctgtgaattctcctacaccgtattcggatcagatgcgtttgttggcgcagttgactgcgggtgaggcggctgttccggaacgctatttcgggtttatcacgtctaacccgccttctggggaggctttggctgcggaggagtctcggcttgtgaagcgtgctgaacgcaggcagacgtcgtttggtcagggttggttgtcggttggtttcctggctgcccgggcgttggattcgagtgttgatgaggccgcgttttttggtgatgttggtttgcgttggcgtgatgcttcgacgcctacccgggcggctacggctgatgctgtgacgaagcttgttggtgccggtattttgcctgctgattctcgtacggtgttggagatgttgggtttggatgatgtgcaggttgaggctgtgatgcggcatcgtgccgagtcttcggatccgttggcggcgctggctggggctatttctcgtcaaactaacgaggtttgataggcgatggcttcgggggctatgtcgaggcttgctgcgactgagtatcagcgtgaggctgtcaggtttgctgggaagtatgcgggctattattctgagcttggtcgtttgtggcgtgccggcaggatgagtgacacgcagtatgttcgtttgtgtgtggagttggagcgtgccggccatgatggttcggcatcgttggctgccaggtttgtgtcggattttcgccggttgaatggtgtggatccgggtttgattgtgtatgacgagtttgatgctgcggcggctttggctaggtcgttttcgactatgaagattcttgagagtgacccggatagggcgaatgacacgattgatgcgatggctgcgggttttgatcgggctgtcatgaatgctggccgtgacacggttgagtggtctgcgggtgcgcagggtaggtcgtggcgcagggtgactgatggtgatccgtgcgcgttttgtgccatgttggctacgaggtcggattatacgactaaggaaagggcgcttactactggtcatacgcggcgtcataagcgtgccggtaggcgtccgtttggttcgaagtatcatgatcattgtggttgtacggtggttgaggttgttggcccttgggaaccaaatagggctgatgccgagtctcagaggacgtatgagaaggcccgtgagtgggttgatgatcatgggttgcagcagtcgcctggcaatattttgaaggctatgcgtactgttggcgacatgagatgatggtttccggttgtgtgccgccggttatcggtgcacagggttgtctcccgcacgggggtcaacaatgttgtgttgttttccgcaaggagtatagggttaggctatggccgatcaaaaagttgaagaacagaatgttgacaatgatgctgttgagcccggaaagggtggagacgttgttgatgttgtgaaggatgggcaggcttccggcgatgatcatgccggtgatgtttccgtgaaggaggagtcttcttctggcacggattggaaggctgaggcccgtaagtgggagtctcgtgctaaaagtaatttcgccgagttggagaagcttcgtacatcgagtgacgattctggatctactattgatgagcttcgccgcaagaatgaggaactcgaagacaggatcaacgggtttgttcttgagggtgtgaagcgcgaggtggcttcagagtatggtttgtccagtgatgcggtcgctttcttgcacggtggcgatcgtgaagcgctggtggagtctgctaaggctttgaagggtttgatcgaccagagtggtggtggcgcgggtgtgcgccgtcttgcggggagtgcccccgttgatgatgttaaacgacgtgagggtgtcgcgtttgtggatgctcttgtcaataattctaggagatgatttctgatggctgacgattttctttctgcagggaagcttgagcttcctggttctatgattggtgcggttcgtgaccgtgctatcgattctggtgttttggcgaaactgtcgccggagcagccgactatttttggcccggtgaagggtgccgtgtttagtggtgttcctcgcgctaagattgttggtgagggcgaggttaagccttccgcttcggttgatgtttcggcgtttactgcgcagcctatcaaggttgtgactcagcagcgtgtctcggacgagtttatgtgggctgatgctgattaccgtctgggtgttttgcaggatctgatttctcccgctcttggtgcttctattggtcgcgccgtggatctgattgctttccatggtgttgatccggctacgggtaagcctgctgcggctgtcaaggtgtcgctggataagacgaagaagacggttgatgccaccgattccgctacgactgatcttgttaaggctgtcggcttgattgcgggtgccggtttgcaggttcctaacggggtcgccctggatccggcgttctcgtttgctctgtctaccgaggtgtatccgaaggggtctccgcttgccggtcagcctatgtatcctgccgccgggtttgccggtttggataattggcgtgggctgaatgttggtgcttcttcgactgtttcgggtgccccggagatgtcgcctgcctctggtgttaaggctattgttggtgatttctcgcgtgttcattggggtttccagcgcaatttcccgatcgagctgatcgagtatggtgatccggatcagactgggcgtgacctgaagggccataatgaggttatggttcgcgccgaggctgtgctgtatgtggctatcgagtcgcttgattcgtttgctgttgtgaaggagaaggctgcaccgactcctcctccggccccgaagcctgagcctaatcctccgtctggtaactgatacaagataagcgaatgtgtactatgtgcagggggtggtgttgatgggtatcattttgaagcctgaggatattgagcctttcgccgatattcctagagagaagcttgaggcgatgattgccgatgtggaggctgtggctgtcagtgtcgccccctgtatcgctaaaccggatttcaaatacaaggatgccgctaaggctattctgcgcagggctttgttgcgctggaatgataccggggtttcgggtcaggtgcagtatgagtctgcgggtcctttcgctcagactacacggtctaatactcccacgaatttgttgtggccttctgagattgccgcgttgaagaagctgtgtgagggtgatggtggggctggtaaagcgttcactatcacacccactattaatggtcgatatgtgcattctgaggtgtgttccacggtgtggggtgagggttgctcgtgcggatctgatattaacggctacgctggccctttgtgggagatatgatatgaccagttttccttatggtgaaacggttgtgatgcttcagccgactgttcgtgtcgatgatcttggcgacaaggtggaagactggtctaagcctgtcgagactgtgtaccataacgtggccgtttatgcttccgtttcgcaggaggatgaggcggctgggcgtgactctgactatgagcattggtcgatgctttttaagcagtctgttgtgggtgccggttatcgttgccggtggcgtattcggggtgttgtgtgggaggctgacgggtctcctatcgtgtggcatcacccgatgtctggctgggatgcgggcacgcagatcaatgtgaagcgtaagaagggctgatagattgtggctcaggatgtgaatgtgaagctgaacttgccgggtattcgtgaggtgttgaagtcttttggggtgcaggctatgttggctgagcgtggcgagcgtgtcaagcgtgcagcctcggcgaatgtgggcggtaacgctttcgataaggcccagtatcgtgcagggttatcatcggaggtgcaggttcaccgtgttgaggctgtggcccgtattggcaccacatataagggtgggaagcgtattgaggcgaagcatggcacgctggctcgttcgattggggctgcgtcgtgattgtttacggtgaccccaggaagtgggctaaacgcgtgctcaaggatgatggctggctgtctgggataccgtgtacagggacggtgcccgatgattttacgggtgatctgatttggttggctcttgatggtggcccgcagttgcatgttcgtgagcgtgtttttttgcgggtgaatgtgttttctgatatgccggatcgtgctatgtctttggctcgtcgtgttgaggctgtgctggctgatggtgtggacggtgaccctgtggtgtactgtaggcgttctactggacctgatttgctggttgatggtgcacgttttgatgtgtattcgctttttgagcttatatgtaggcctgcggagtctgaataagcttattgtttttgttttaatgtaattgtttgatatttaatgggggttatgatggctgcaacacgtaaagcgtctaatgttcgctctgctgttacgggtgacgtctatattggtaacgctcatgccggtgacactattgatggtgtgaagacggttcctgacggtcttaccgctttagggtacctgtcggatgacgggtttaagattaagcctgagcgtaaaacggatgatttgaaggcttggcagaatgcggatgttgttcgcactgtggctacagagtcgtctatcgagatctctttccagctgatcgagtctaagaaggaggttatcgaactgttttggcagtcgaaggttactgccggagccgattctggttcgttcgatatttctcctggtgccaccactggcgtgcacgccctgttgatggatattattgatggcgatcaggttattcgctactatttccctgaggtcgagttgatcgatcgtgacgagatcaagggcaagaatggcgaggtgtatgggtatggtgtgacgttgaaggcgtatcctgcccagattaataagaagggtgatgcggtgtctggtcgggggtggatgacggctttaaaagctgatactcccccggttcctccttctccgaagccggagcctcctaagcctgagccggatccgaatccgccgtctaataactgatacacatagtttgagggattgttgatagatgagtgacacaggttacacgttgaagattggtgaccgtagctgggtgttggcggatgcggaggaaacagcgcaggctgttcctgcccgcgtttttcgccgtgccgccaggattgcccagtctggggagtctgctgatttcgcccaggttgaggtgatgttttccatgttggaggctgccgccccagaggatgctgtggaggccttggaggggcttcctatggttcgtgtggccgagattttccgtgagtggatggaatataagcctgacggtaagggtgcctcgctgggggaatagtttggctccacggcctgattgatgattatcgtggggccatcgaatacgatttccgcaccaagtttggtgtttctgtttatagtgttggtggcccgcagatgtgttggggtgaggctgtccggctggctggcgtgttgtgtaccgatacgtctagccagttggcggcccacctgaatggttggcagcgcccgtttgagtggtgcgagtgggctgtgctggacatgctggatcattacaggtctgctaatagtgaggggcagccggagcctgtggcgaggcctacggatgagcgtagggcccggtttacgtctgggcaggtggacgatattttggcgcgtgttcgtgccggtggcggggtgtctcgcgagattaatattatggggtgaatagtgtatgtctggtgagattgcttccgcatatgtgtcgttgtatacgaagatgcctggccttaaaagtgatgttggtaaacagttgtcgggtgtgatgcctgctgagggtcagcgttcgggtagcttgtttgctggcgggatgaagttggcgcttggtggtgcggcgatgatgggtgccatcaatgttgctaagaagggcctcaagtctatctatgatgtgactattggtggcggtatagctagggcgatggctattgatgaggctcaggctaaactgactggtttgggtcatacgtcgtctgacacgtcttcgattatgaattcggctattgaggctgtgactggtacgtcgtatgcgttgggtgatgcggcgtctacggctgcggcgttgtctgcttcgggtgtgcagtctggcgggcagatgacggatgtgttgaagactatcgccgatgtgtcttatatttcgggtaagtcgtttcaggatacgggcgctatttttacgtctgtgatggctcgcggtaagttgcagggcgatgacatgttgcagcttacgatggcgggtgttcctgtgctgtctctgttggctaggcagacgggtaaaacgtctgctgaggtgtcgcagatggtgtcgaaggggcagattgattttaacacgtttgcggctgcgatgaagcttggcatgggtggtgctgcgcaggcgtctggtaagacgtttgagggcgctatgaagaatgttaagagcgccctgggctatcttggtgctacggctatggccccgtttttgaacggcctgcggcagatttttgttgcgttgaatccggttattaagtctatcacggagtctgtgaagcctttgtttgcgtcggtggatcaggggattcagcggatgatgccgtctattttggcgtggattaaccggatgccggctatgatcacaagaatgaatgcacagatgcgcgccaaggtggagcagttgaagggcatttttgcgagaatgcatttgcctgtccctaaagtgaatttggctgccatgtttgctggcggcaccgcagtgttcggtcttgtggctgccggtgtggggaagcttgttgcggggtttgccccgctggcggtgtcgttgaagaatctactgccgtcgtttggtgctttgaagggtgccgctggggggcttggcggcgtgtttcgcgccctgggtggccctgtcggtattgtgatcggcttgtttgcggcaatgtttgctacgaacgcccagttccgtgccgcggtgatgcagcttgtggctgtggttggccaggctttggggcagattatggccgctgtgcagcctgtgtttggtctaattgctggtttggtggcacggttggctcccgtttttggccagattatcggtatggttgccgggttggctgcgcagcttatgcctgtgattagtatgcttgtcgcccggctggttcctgttatcacgcagattattggtgcggtgacgcaggttgctgcaatgttgttgccggcgttgatgccggtgttgcaggctgttgttgctgtgatacggcaggttgttggcgtggtcatgcagttggtgcctgttttgatgcctgtgattcagcagattttgggtgctgtcatgtctgtgctgccacctattattggtcttatccggtcgttgatgcctgtgattgcggcggttatgcgtgtggtggttcaggttgttgcggttgtgatacaggtggtggcccgtattcttgctgttgtggctccgatggtggcggccgtggtcgggtttgttgcccgtattgttggtgctgtcgtgtcggctgtggcccgtgttattgccgctgttgcccgtgtcatctcgtgggttgttgcccattttgtgtctggtttggcgcgtatgggttcggtggttcaggctggctggaatcatattagggcgtttacgtctgcgtttattaacggtttcaagtcggtgatttctggcggcgtgaacgcggttgtggggttttttgcccggcttggttcttcggttgcctcccatgtgaggtctggttttaacgcggctcgtggcgctgtttcttctgcgatgaatgctatccggagtgttgtgtcttcggtggcgtctgctgttggcgggtttttcagttcgatggcgtctagggttcgtagtggtgctgtgcgcgggtttaatggtgcccgtagtgcggcttcttctgctatgcacgctatgggctcggctgtgtctagtggtgtgcatagtgtgatagggtttttccggaatctgcccagcaatattaggggcgctttgggtagtatggggtccctgttgatgtctgctggccgtgacgtggtggccggtttgggtaatggtattaagaatgctatgagtggcctgttggatacggtgcgtaatatgggttctcaggttgctaatgcggcgaagtcggtgttgggtattcattccccgtctcgggtgtttcgtgacgaggttggccggcaggttgttgctggtttggctgagggtattactggtaatgctggtttggcgttggatgcgatgtcgggtgttgcttcgcagcttccggatgctgtggatgcccggtttggtgtgcgatcgtctgtgggctcgtttaccccgtacgaccggtatcggcgtgctcagggtgagagtgttgtggtgaatgtgaatggcccgacgtatggtgatccggccgagtttgcgaagcggattgagcggcagcagcgtgacgctttgaacgcgttggcttacatgtgagtaaaggggtatgcatgtttattcctgacccgtctgatcgttctggtttgactgtgacatggtcgatggatccgcggtttggcgacgagcgtgtgcttcatttgacggattatacggggtcgtctcctgtcatgttgttgaatgattcgttgcgcggtttgggtgttcctgaggtggagcatttttctcaaacgcatgttggggtgcacggttcggagtggcgcgggtttaatgtgaagcctcgcgaggtgacgctgccggtgttggtgtcgggtgttgacccggatccggtgggcgggtttcgtgacggttttttgaaagcctatgacgagttgtggtctgcgtttcctcctggcgaggagggggagttgtctgtgcagactcctgccggtcgtgagcgtgtgttgaagtgccggtttgattcggtggatgacacgtttacggttgatccggtgaatcgcggctatgcccgctatgtgattcatttgacggcctatgacccgttttggtatggggatgagcagaagtttcgttttagtaacgctaagttgcaggattggctgggtggcggccctgtcggcaaggatggcacggcgtttcctgtggtgttaacaccgggtgtgggctcgggttgggataatctgtctaataagggtgatgtgcctgcgtggcctgtgattcgtgttgagggcccgttggagtcgtggtctgtgcagattgatggtttgcgtgtgtcttcggattatcctgtcgaggagtatgattggatcactattgatacggatcctcgccagcagtcggcgttgttgaacgggtttgaggatgtgatggatcgtttgacagagtgggagtttgcgcctatcccgcctggcggttcgaagagtgtgaatattgagatggttggtttgggtgccattgttgtgtcggtgcagtacaggtttttgagggcttggtgaatggttgatggctggtcttgttccgcatgtaacgttgtttacgccggattatcgccgtgtggcgcctatcaatttttttgagtcgttgaaactgtcgttgaagtggaatggtttgtccactttggagttggtggtgtcgggtgatcattctaggcttgacgggttgactaggccgggtgcacggctggttgttgattatggtggtggccagattttttctgggcctgtgcgtcgggttcatggtgtgggtccttggcagtcttcgcgggtgactatcacgtgtgaggatgatatccgcatgttgtggcgtatgctgttgtggcctgtgccttatcgttccagcatcattgggatggagtggcgtgccaatagggattatgcccactattcgggtgcggcggagtcggtcgctaagaaggcgttgagggataattcttggcgttttccgcctgatatatttatggtgaatgataagagtcgtggccgctatattaaggattttcaggcgcggtttcacgtgtttgccgataagttgttgccggtgttgtcgtgggctcggatgactgtcacggtgaaacagtttgagaatgtgaagcaggatcagcgtggtttactgtttgattgtgtgcctgctgtgacgcgtgagcatgtgttgactgccgagtctgggtctattgtgtcgtgggagtatgtgcgtgacgccccgaaggctacggcggtggttgtgggtggccgcggcgaaggcaaagatcgtctgttttgtgaggattttgacgcgttggccgaggatgagtggtttgatcgtgtcgaggtgtttaaggatgcccgtaacacggattctgagcatgtgcatctcattgatgaggcggagctggtgttgtccgagtcgggggccacgtcggggtttaagatcgagttggctgagtcggatgtgttgcggtttgggccaggcaatctgatgccgggtgatttgatctatgtggatgtgggctcggggcctattgcggagattgttcggcagattgatgtggagtgtgtatcgcctggtgacgggtggacgaaggtgactcctattgcgggggattatgaggataatccgtcggccctgttggctcgccgtgtggctgatttggctgcgggtgtgcgggatttgcaaaaattttagaaaagaatcgggggtttgttgtgggtattgtgtgcaagggttttgatggtgtgttgaccgagtatgattgggctcaaatgtctggtctgatgggtaatatgccgtctgtgaagggcccggacgattttcgtgtcggcactactgttcagggtgccacagtgttgtgtgaggtgttgccggggcaggcttgggctcacggggtgatgtgcacgtcgaatagtgttgagacggtgacagggcagctgcctggtcctggcgagacccgatacgactatgttgtcctgtctcgggattgggagcagaatacggccaagttggagattgttcctggggggcgtgcggagcgtgccagggatgtgttgagggctgagcctggcgtgtaccatcagcagttgttggcgactttggtgttgtcgtctaacgggttgcagcagcagttggataggcgtgctgtggcggcccgtgtggcgtttggggagtctgctgcgtgtgaccctacccctgtggagggtgaccgggtgatggtgccttcgggggctgtgtgggctaaccatgctaacgagtggatgctgttgtccccgcgtatcgagacgggttcgaagcagatccagtttggcgggtctgctgtgtatgcttacacgatcccgtttggccgcccgtttggtagtgcgcctgtggtggtggcgtctatggcgacggcggctggtggtacgcagcagattgatgtgaaagcctacaatgttactagcaagtattttcagttggcgtttatcacgaatgatggttctaagccttctgatgtgcctgcggttgctaactggattgctgtcggcgtgtaatgtacggcttgcgggtatgtgacgtgttgtggttgttgtagtggtagggggctgtagtgtcatggcttacacccacactcgtagcctctctttgtaccgctatcgctactgttcttggttcgattcaggcggctacgtacaggtcgaagaagaggctgaggcagttgtctgcgcaggttgatgcgatggaagaatacacgtggaatattcgccatactgttcaccgctataatgcgaatctgccggagaatgttgagccggtaaagatgcctgatttgcccgagtttttgaaggatactgttgatggtggtggggggtgaattgtgagggagttggaggaagagaagcggcagcgccgctcgtttgagaaggcttccatgatactgttgttcctgtcgcttgtactactggcggtggtcgccgggggtgctttacgtttcggtgctgtggcttcccagcgggattcggagcaggctaaagcccagtctaatggtacagccgctaaagggttggctagccgtgtgcggcaggtgtgtgcctctggcgggcaggagtcggtgcggcttcaccagtctggcttgtgtgtggatgctcagcgtgttgagcgtagcgtgcagggtgtgcctggtcctgccggtgtgcgtggcccgcaagggcctgcaggggttgacggccgggatggtgttgatggttcggctgggctggttggccctgttggcccgcagggttcccctggtttgaatggtgtgaagggtcctgacgggctgcccggtgctaacggttcggatggccgtgatggtgttgccggtgtgaacggggctgatggcaaggatggtgtgccaggtagggatggcgctgatggggctgatggtggccgcggccctgttgggcctcaggggccgcagggttctgccggtgccgatggcaaggacggtaaggatggcgctgatgggcgctcggtgatatcggtgtactgttccgggggccgcctggttgtgaaatatagtgacggtacggcctctaccatagcgggttcggtggcctgtgagggtgtgaaaccatcaccggtggttaccgtatcatcccacaagtaaaagaggaagtgtgttactagtgttgatagtagtgtttgggggtggcgtgttgtgagatacattccagcggcgcatcactcggccggatcaaataagccggtgaaccgtgttgtgattcacgcgacatgcccggatgtggggtttccgtccgcttcccgtaaggggcgggcggtgtctacagcaaactattttgcttccccatcgtcgggtggttctgcccattatgtgtgtgatgttggggagacggtgcagtgcttgtcggagtctacgattggttggcatgccccgccgaatccgcattctttgggtatagagatttgcgcggatgggggttcgcacgcctcgttccgtgtgccagggcatgcttacacgagggagcagtggctggatcctcgggtgtggcccgccgtggagcgtgccgccatcctgtgtcggcagttgtgtgacaagcatggtgttccgaaaaggaagcttagcgtatccgatttgaaggccggtaaacgtggtgtttgcgggcatgcggatgttacggatgcgtggcatcagtcggatcatgacgatccggggccgtggtttccgtgggacaggtttatggccgtagtctgcggcggtagtggagagagtgaggagttaactgtggctgatgtgaaagccttgcatgatcagattaaacaattgtctgctcagcttagtggttcggtgaataagctgcaccatgatgttggtgtggttcaggtacagaatggtgatttgggtaagcgtgttgacgccctgtcgtgggtgaagaatccggtgacggggaagctgtggcgcaccaaggatgctttgtggagtgtctggtattacgtgttggagtgtcgtagccgtcttgacaggcttgagtctgctgttaacggtttgaaaaagtgatggtggtttgttgtgggtaaacagttttggttaggtttactggagcgggcggctaagacttttgtgcaaacgtttgttgctgtgttgggggtgacggcgggtgtcacctatacggcggagtcgtttcgcggtttgccgtgggagtcggccctgataacagctacggtggctgcggtgttgtcggtggctacatcgtttggtagcccgtcgtttgtggccggcaagcccggcaagcctcagctggatgcgggtttggttccaccggatgatcccggaatagtggagcctcattcggtggatgtgtcggatcctggcatgatcgagccgatggatgaggctgatgttgccggctatgtgccgaagcgtgccgccgagtcggaggttggcacggtagagtctactgttgcataagtgaatatagatgtgtgccccagcggtgctgccacgatcgtgtggtggttgccgctggggcactatttttgtgtctatagtattctatgattcgttgctgtcgatggtttcttcgatcagctggtccaggtggatgcaggcggagatagtatcgttggcctggtgcagaacgttctggccgataacatttttataattgtcgcggtggcagatgatagactgcatgatatcgtcggcttccgcttgcaatagtttggcctggtatgcgattccggcgagccaatctatggcttcctggcttgcccgtgtgtcgtctggaatgccacgggtgttgctgttgtttgggtatcctgcactgtcgcagtcccacaagatttcgctgcactcgtctagcgtgtcctgatcgatagcgagatcgtcgaggctgacttctttgacggtaaggttcacgttgtcgagtgagatgggtacacggtactggttttcgacaccgtcaacaatgttttccaattgctgcatgttggtgggctgttgttggatgattcggtgtactactgttttgagggcggtgtaggggatattgtgtgtgttgtccatcgtgttatgccattccttcgttatcgtctggcatgtagtatgtgctgtttgcgtactcggttaacgtcatcagtgtttggtctgcccactgtttcacggtttgccgggtgactccgagtcgttgggctgccaccgaataggtttggtcatacccgtagacttcccggaacgctgccaacctagctagccgtttcctttgtttggatggctggcaggtgagggtgtagtcgtcgatggctagttgtagatcgatcatggtgacaatgttgttgccgtggtgttgtggcgcggtgggtggtggtggcattcctggttcaacactcggtttccatggtccgccgttccagatccattgcgcggcttggataatatcggctgtggtgtaggtccggttcatgtgtcatcccctgaataggttgtcgaggttgtctgggttgctggtgtcgaatcgtccgacgcagtggcagtagtcgtacatgagtttgatgatgtgttggtggtctcccaaataggtgtttccgctgatgctgtaggtggctgtgccgtctttactaatagtgtatttggcggtgatggtttcgggtgtttcggtgttggtgatgatggcggtggtggtggcgcctactgtttgtagcctggtggtttgggtgccgtcgtcgaggatggtggtgaccattatgattctccttagttgctggtttggttgtcggctagatgaataatatcggataaaggtttcggctggtctaaatgttgtgtggttttgttggctagccgtttggctaccctgtagcacattttggtgtagtgtttgttgtctaggttgtggtattgttcccgcaccgcaatatatagtagggagtcttggtagaggtcgtctgcgctgattgcggggtagtgtgtaaccactttggtgcatgcccggttgagtgtgcgtagatgatggtctgtggcccatccccacgatgcggtggtggctaggtctgcttttgttggtcgcctgctcatggcactattacctggctatctggtagttgtttggtgttttgttgttgatagtgtagcacacgagtccggggtttccggtggtgcccgtcttgtgccggaaccatgtggattcgccttccatggatgggcattggatgaaggtgcgtgtgccttgctcagagatttctaggtggtgccggtgcccggccatcaggatgtgggatgtggtgccgttgtggaattcttggccgcgccaccattcgtagtgtttgccggtgcgccattggtgcccgtgggcgtgcaggatttgtgtgcctgccacatcgacggtggtggtcatttcgtctcggctggggaagtggaagtgaaggttggggtattggttgttgagctggtaggcttctgcgatggcgcggcagcagtccacgtcgaaggagtcgtcgtaggtggtgactccttttccgaagcgtacggcttctccgtggttgccggggatggatgtgatggtgacgttggcgcagtggtcgaattggtggatgagttgcatcatggccatgcgggtgagccggatttgttccgtcaggggtgtttgtgtgcgccaggcgttgttgcctccttgtgacacgtatccttcgatcatgtcgccgaggaaggcgatgtggactcgttgcggtttgcctgcttgctgccagtagtgttttgcgacgatgagggtgtgtaggtagttgtcggcgaagtgtgctgtttctccgccggggatgcctttgccgatttggaagtctcctgccccgatgatgaaggctgcagtgctgtagtcggtgtgggtgtcttgttcgggttttggtggctgccattcggctagtttatcgacgagttcgtctatagggtaggggttggttgcgggttggtggtcgatgattttttgtatggatcggcctgtttctccgttggggagtgtccattcggagatgcgtgtgcggcgcacggtgccgttggctagattgtcgtcgatggtgtcgatggcgttgtcgtggttggctagctgtgtgaggagccggtctatgttgtctatcactgggtatcatcctcttcctcgtgtgtggtggtggcttgtttgcggcgatggtctttgataacggtggcggagatggggtatccggcttcagtgagcatttgggctagctgtgtggcggggatggacctgtcggcgaggacgtctgcggctttgttgccgtagcgttggatgagggtttcagttttggttgccatgatgtcctatcggttgtgtggtgggttgccatcctgtgcggcagtcgccgtcgtgtcctggtttgcgtgtgcaccatgagacttcgccggcattgtggatgatggcacggccgcatatgacgtcatgtaggtgttcgggaaacttatcgttgttgttgtccccgtacatgtcgatcaagtgttgggttttagtaaccatcatgtctcctatgtgtgaaagagtgtgcaaatactatgctggtgtcatggatgtttatgcgggtatggttttcatcaccttgctgaacgttacttggttactgtacatcatctgggtgatttcctgatccgttttgtcggggtgctgttttcgcaggtttgcccattggcaggcgttgtcggtttcctgctgtaaacgtgtcaggtgttgttcgttgatgatgtgtttccacattgtccacgagacgtcgagtcgtttgagcatgtcgatggctggcacgttgaaggagttgaggaagagtatttcctccgtgtagtagtctttttcgtattggtcccatccgcttcggtgcctgttgggctggtttttagggtaggcttcccggcatactttgtgcaaacgcttggccatgtctttgggtagcctaatgtcggggttggcgcggatcatggatcgcatcccatcataggtggtgccccaggtgtgcatgatgtggagtgggtcttcaccatcagcccatttttctgcacagatggcgaggcggatacgcctccgggcggctttgctagtgtcgcggcggccggggatggggcatgtgtcgagggggtccatgatgctttttatgcctttctttgtttggtttgcttgtgtggttttattgtagcactgtgtctagtgcttgtgtcaaccctgtttttccggcctgcaggtaggtgtctgtgacatcgcccagggtgaggggcacgcgggtggcttgggggagtgccgtctggagggtttgggccatctggtctcctgctttgtcggggtctgaccagatgtagatgtggtcgtagccttcgaagaatttggtccaaaagttttgccacgaggttgcgccgggtagggctacggccggccatccgcattgttcgaggatcatggagtcgaattcgccttcgcaaatgtgcatttcggctgccgggttggccatggcggccatgttgtagatggagcctgtgtcccctgccggggttagatatttggggtggttgtgggttttgcaatcatgctggagtgagcagcggaaacgcatttttcgtatttcggctgggccgtcccagacggggtacatgtaggggatggtgatgcactggttgtagtcttcgtggcctgggatggggtcattgtcgatgtatccaaggtggtggtagcgggctgtttcttcgctgatgcctcttgccgagagcaggtcgagtatgttttcgaggtgggtttcgtagcgggctgaggctttctggattcggcggcgttccgcaatgttgtagggttgtagtgagtcgtacattcgggttttctttctctaattgttgtttcagtttggcgaggcctcctccgatgccgcatgtgtggcagtaccagacgcccttgtcgaggttgatgctcatggagggctggtggtcgtcgtggaacgggcagaggatgtgttgctcgttcctggatggattgtaccgtatctggtaggtgttgaggaggcggcaggtgtcagaggtgtgggaggagctcgttgagggttgataccacataggcttcgctccatggcttgttgcgctgtttcatcactacgagtccgatggtggaattgttttctcggtttcggtgggtttcgtagttgcgtgcctcccggctggcttgtttcacgaattcggcgaggtgtgcctgtcctgctttggcttcgatcacataggttttgtggccggttgtgaggatgaggtcgccttcatcctctttaccgttgaggtggaggcgttctatatcatagccggtgtcgcgtagctggtggaggagtcgtgtttcccattcggctccggcccggcggttgcgtgcctgttgtgttgacatgatagtcctttgtggtgttcggtcatgttccatggctgtttttcggcgagtggcccgaagaatgtgtattcggggtaggctcgcagtcgttcgtatcgggtgccgtctgggctggatttgcctgtgcgctgtttgagtacggcgatgcgtgcctctgccggtatcgtgagcccgttgccgttatcttcgccaccatacagggagactcccaatatgagttgtggtttttcggagaggccgtttttgatttcccgcctagccggggggtgttcgatgtcggtgccggttttgtcggttgcgtggtgtgtgacaataatggtggagccagtatccctacccaatgctgtgatccattgcatggcttcttgctgtgcctggtagtcggattcgcagtcttggatgtccatcaggttgtcgatcacaatgagtggtgggaaggtgttccacatttccatgtaggcttgcagttccatggtgatgtctgtccatgtgatgggtgactggaatgagaatgtgatgtgttggccgtggtggatgctgtctcgatagtattctggcccgtagtcgtcgatgttttgttgtatctgggcggtggtgtgttgagtgttgagtgagatgattcgtgtggaggcctcccagggtgtcatgtcccctgatatgtagagtgcgggctggttgagcatcgctgtgatgaacatggctagcccggatttttggctgccggaccgccccgcgatcatgacgagatcccctttgtgaatgtgcatgtccaggttgcggtagaggggttctagttgtggtatgcggggcagttcggctgcggtttgggaggctctctcgaaggatctttggagagagagcatcggagccttaatctatctgtctatcggttggatgatgttttggtggtcagatggagtcgatgtcgatgtcagcatcagcaggggctgtggtgtcgtctagctggccgttatcgcgtttgtctacgtattcggcaaccttatcgtagatggcgtcgtctaatggtttgagcacgaccgcgttgaacccgtttttggtgcgcacggtggcgagtttgaatgcctgttcttcgccaaggtaggcttctaggtcgcggatcatggagtgtgggcggtcgttgttgccgcgggctttctcgataatggcgttggggatggtttctggggtgccgttgttgagatcgtctagggtgtggaagattgtgacatcagcgtagatgcgatcggcgacctgtccaccgtagccttcggtgttgtgctggacgtcgcggattttgaaggcgatggcggtggcgtcctggtttcgggaggggttgaagaaggtgctgttgctgttgttgcggtagtttgcgagtcccattgttgtttcctttactgttttgttggtttgtttgttggttttatcgggtgaggctgtttcgtttgctgcggaaagcctcggaaacgtcactgttactggtgatgatctttttgtactgtttgaggaggtcggctagctgtgctttgcttgttgcattgttgattttgtcgatgatggtgttgtttccttctgaggcgatgttgtctacgtagtctttggcggcctggttgtatcggtcttggaggattatggatgctgtggcgatcagtgttgccaggtcccagttccttgccgcggagctgtttttgagtccgccgaggaggtcgatgatagtcttctttacctggtcggcggtgtctccgcggatgacggtccatggggcggcgtagtcgcctccgtatttgagggtgacggtgaatcggtcgtcgtctgtgttgtcggtcactggtgctccttgtcttcttttgttggggctgtgatggtggtttctatggggtacctgtaggcgtctttcccgttgacagcccagcaggcgtccttgacggggcagcctttacagagtgctgtgacgtggggtacgaagatgccttggctgattcctttcattgcttgactgtacatggatgatacatgccggtaggtgttgttgtcaaggtcatagagttcggttgctgtgccttgtgtcggagactggtcgtcgttgcggctggtggctggcgtccaaaacatgcctttcgtcacatcgttgccgtgttggttgagcatgtaccggtatgtgtgcagctgcatactgtcggcgggtaggcgtccggttttgaggtccaaaatgaaggtttcaccggtgtcagtgtcggtgaaaacgcggtcgatgtagccgacaatagtggtgccatcctggagggtggtttctaccgggtattcgatgcccggctggccgtcaataacagcggtgatgtattctgggtggttgcgcctccatgttttccaccggttgacgaaggtggggccgtatatcatccaccaattgtagtcttttttgtgtggcccgcccgattcgcacatgtttttgcatattcggccggagggtttgatgtttgtgccttctgatttggcgagggcgacttgggtgtcgaaaatgtttttgaaggatgagagtttgtctggcagtgcagggtattcggcgggattgtacaggtgtaggtcgtattgttcggtgatgtggtgtatggcgcttccggcgatggtggcgtaccaggtgtggtgttgggtgtggtagccgtgggataggcgccatttttctccgcattcggcccactgggtgagtgaactgtaggagatgtggcctggatgatcaatggtggacggtttttgtgctagaggcattacttgtcgcctttgtgggtgttccatgggttacgggtgtcttggccggcgtggtgttgctggtatgcgaggagtgcgaggcagtgccaggcagcatgggctagatggggtagcccggattcatcatcgaggttgtttccttgctgccatgatagcaggtgcctgtagagggcgtcgacgctgtggctccacggatagccgccggtccagttgttgtcgccgtatttggtggcaccgtatcctgccacggagccgagggcgtgcaaggctgcggggtcgatgagggatagcctgcaaagtttcaattcttttttggcaccgctgttggggtcggtgtacatgcgggttggcttatccatgagatgtgtgctccttaggggtgggttactggttggggttgtgggcgagtgctacggcgagaataatgatggcgagggtttcagcgatcagtatgggtgttgtgatcatttagtgtttcggggattgttggtgagtgtggaggcgcctaggagggtggtgagggcgcatgcggcgatgatggcgagggctgccttgtgtggggtgccggttgcgtacatccatgtgatgatgccgccttggatccatgccagtgtggtgaagaaagtttcgtagctgtgtagctcaatgttgttgttgggtgtgttcatgcttgctcctgaagaatggtgttgatggttttgtaaatgttgtacaggtcggcttcgatggtttgtagctgtttgatttggtggtcgagatcaatgtctgggttgagggtgttgatgcgggaggcgatgtcggtggctgtgcgtagtgtgccgccggtgtggtgaatgatgtgtgccgtgtcggcgagtccggtggtgacggcgtagtgggagaggagaggcatagctggggggtgctccttggcgggttactgttgcgggttgatgttgaggtcggtgacgtgcgggtggtcttctgttccggtgacgaggcagtggacggtgacgggtagtttggatgctccgggctgtttcatggttgcgccgtagacgatggagaaggtgtctttgccaataattttgtggagttggaggtcgatgtcggggttgccgttccatttgacaccttgcgtggcggccttctgttcggctttgcggttgcaggtgtgtgcggcggtgatcatggtgagaccttgtgaggtttcttcaccccttgcctgggcttgcttgtgggttttggcctgctcggctcgcagtgactgttctgcggctgcctgccgtgccgctttctcggctttgcgctgttgggtggttttgggggtccattcggtgttggctgtggtggcctgtggggctggctgtgaggcgagtggcggattgtcgtctggggctggcatgaatgaggcggcggcgatgatggcggctgtgattccggcgatggtgtagcctgttttcttgttcatgactgttgtcccctttccggggtgttgttcgttgctgacatgatcaatcatggtgtgggcggttccccatgtcaaggctgcgctcaacgattgtgagcgatccttgtgtggctaggggtgatggcttctttcgcccaataggatgtgccaccgctggtccagtatccgagtttgttgcgctgcatgcccttcgcctccatctcgtccacggtgaggcacctgcggcgattggggcctgtcttgaccccgtggtcgcctacccggtgcatgtcgcctgaggtggtactcgtgaatgtctcgtgacagactgtgcagtgctctggcttgtatccgatgattgtgctatcgcacttgtggcatgtccattgcatgattgctcctattttccattataagacttcctgtagtgccattttagcgccttgcgagtcttgggggtacaactatataggtcaggtatttctaggcgattctaggctcattgtgtgcgactgggtgttatcgggcacacagggtgagcaggcttccgatgttgatgcggctcacattccagtagagttgtgtggcttcaccgccggtgagtggcttccactcgtcatggctgaacacggtgccatcggatgcgatgaatgtgttggggcgtagcttgtggagttcagtctctacgctctgccggtaggcttcggcgaggccctcaaaatccatgtggtcgcaggagaggttttcgaggcgtgtcaggtcgaaaggctcagggcagtccggggtgggggtgtaaagctgggtgaagtggttggcgatcttctgcatgacgggttccttttctcgtgtggtgggttgatagttttatcgtgtggcttcggcaatgatggcgtccacatcgatcatgtcgatgagatcgttgagttcctcggcctcgttctcggagaggtggcgccagtcgggtggcccgtatacggcaccgtcgagggtgacagtccacaggggccggatgagccgtacggcttcctcgactttggcacggtataggcggcagatgatagacgtgtgggtgttgcctatgtcacatcctgccaggtgtgcggggtggagtgggtggatttctgtctgcccgtagaggctggtgaaggatggtgtgatgagtgtgccatccatgagggtgtgctcctttcggtggtgtatgggttgttgtggtttctagagtgtgtagatggcgatcccatagtcaaggctgcgctcatttggattgagcgtttcatgggatgtggcaggggatgtggcgtatctcacttaagcctttatggcctctctcagcgcctgaaatcttctggcggtaggattatgcagggttgaccctgctaatcgattctaggggccttctagagcgtctcaggggtatgtctgggtgatagcgggtgtggcagatgatctagcgagtcaaggtgccgagctgagacataagatctatcatctaggtgtgtgagatgcatcacatcctcctggcgtggtgtacacccttaaggctactcggtcgatctggcgtggagggtgtagcccagaaatgccgtttaaagctgtgactcggtggattagagcgccttacagggtgggggctaggtatttatacccccaagcaattctgatcgattctagacgcctacaggagcccgatacacgatcagctatccagacgcagatcaccagtccctatcctggttagctcagcctacactatgtggacagtgtggaatactgtaggggaagaaggacacggtaaaagaaagagggaggcatcagccttcaagccttaaggtcttagcgcttagcaccgatggtcttagcagttagcaccgagcccctcaagggctcggcatcagcccgaacaggcacagccctgaaaggagtacacgccatcagggaaggcttgagagtacgaggagccctagcgacgagtactcgaaagcctgagggaacaccctcagcactgatgggcctagcgtgttcggaaaggacacaagagtgaagtgtgagagctgttcgggagtgaaacctgttctgactaggggtttcggtcttaaccaccctcaaaggttacaagactctaagaaaatttaaggaaaagtttaggtttaatttttggacctttactaccaaaaacacccgtttacacccctcaaacccgcctatagagccaaaaccaccagtttgactcatcccaggtggcatatgataggctggacaggtagccagctggacgcaaggccgaaatccgctgacgcggctttcacccttacatccatcagtctaccaaacactttaaagcttcaaggcttagcgctaagcccttaagaccttaacgcttagcaccgagcccctcaagggctcggcatcagtcttaaagctttaaacactttaagtaaacttaagagcttagcacttaaagttaattaataaccttaaaggcttagcacttaaggatataaacttaacatcagtgtttaagactttaaaacttaaaataactattaagacttaaagacttataagctttaaacacttaaagtaactataagactttaaagaccttaagtacttaaagttaaccatcagtcttaaactttaatattataacctataagtcttaaagcttataggtataataatataatataagttataaaagttttagaagagctaaggggttaacttctttacttctctactctctttggttctttctctcttctcttcttttcttcatcaggggagaagaggaacctttaccatcaacgctgatgggctttcaccgtgtgactcgtgtgcttctggtcgcacgctcccggttgcacactcaccacacttactctacctgtgtccctttcaggcttagcgtgttcggctgaaggcgtacggcgtgtcacgctaacacccttaacaccaggtaagacttaaagtgtatattataagtagaagactttaaaaccttaaggtgttcccgcttagcctgtgtcctttagcgctaggcgctaggcgctaagctgtgaaacgcgaacacccatccacccccttttttcttccgtgtccttcttcttttgacaccgctggggggcgatgtgatctttctcacactcatggggggtagtggagaaaacaaccaccccggcacaaacagaacaccccctcaaacgaacaaaacagcccctaggatcgatcagcagggcaagggcaaggtattcatacccccagacgattcccaggccgttacaggagcaatgagaggctcacaggggcaaggggagatcaggggacgtgatggcacataccaaccgcaccgcatccgcctcacaccggcgctggcggcaacgactcatcacccaagcccaacaacaaggccaaaccgaatgcccactctgcggagcaaccatcacctggggcacacacgatctaccaactagccccgaagccgaccacatcacacccgtcagcaggggaggactcaacaccctcgacaacgggcaaatcatctgcagaacatgcaacagaagcaaaggcaatcgcagcgaaccaaacatcaagttccaacaacaaaccacaaaaacattgattccatggtgaaaaacctgccaacccccaccggggacaccccctgcacacccgtgcaagacc

SEQ ID NO: 48 - DNA, 29492 bp, unidentified
  source 1..29492: mol_type = unassigned DNA; note = Bacteriophage of P. acnes
cctcccttttgtggattagtctatttgtcgactttttgcgttggtggtgagtgtggtgcagcctgagcttccggagagtcgcgattggtgtgaggagacgcgtcgttggtggcgtgtgtggggtgaggatagccgtgcccagtttgtgtctgacgaggagtggctgtttcttcttgatgcggctgtgattcatgatgtggtgtggagtgagggccgggcggatttggtggcttcgcttcgtgctcatgtgaaggcgtttatggccatgttggatcggtattcggttgatgtggcgtctggtggccgtggtgggggttctgcggtggcgatgattgaccggtataggaagcgcaagggggcctgattaggtgtctggtgttgttgggtctcaggttcctcgtcatcgtgtggctgcggcgtattcggtgtctgctggcggggatgcgggtgagcttggtagggcttatgggttgacgcctgatccgtggcagcagcaggtgttggatgattggcttgctgtgggtggtaatggcaggcttgcttcgggtgtgtgtggggtgtttgtgcctcgccagaatggcaagaatgctattttggagattgtggagttgtttaaggcgactattcagggtcgccgtattttgcatacggctcacgagttgaagtcggctcgtaaggcgtttatgaggttgaggtcgttttttgagaatgagcggcagtttcctgacttgtatcgtatggtgaagtcgattcgtgcgacgaatggccaggaggctattgtgttgcatcatccggattgtgccacgtttgagcgtaagtgtggttgtccgggttggggttcggttgagtttgtggcccgttctcgkggttcggctcgcgggtttacggttgatgatttggtgtgtgatgaggctcaggagttgtcggatgagcagttggaggctttgcttcctacggtgagcgcggctccttcgggtgatcctcagcagatttttttgggtacgccgcctgggccgttggctgacgggtctgtggtgttgcgtttgcgtgggcaggctttgtcgggtggtaagaggtttgcgtggacggagttttcgattcctgacgagtctgatccggatgatgtgtcgcggcagtggcggaagttggctggtgatactaatccggcgttgggtcgtcgtctgaattttgggactgtgtcggatgagcatgagtcgatgtctgctgccgggtttgctcgggagcggcttggctggtgggatcgtggacagtctgctacgtctgtgataccggccgataagtgggttcagtcggctgtgggtgaggcggctctggttggcgggaaggtttttggtgtctcgttttctcgctcgggggatcgtgtcgcgctagctggtgctggcaagactgatgctggggttcatgttgaggttattgatggcctgtctggcacgattgttgatggtgtgggccagctggctgactggttggcgttgcgttggggtgacactgaaaagatcatggttgccgggtctggtgcggtgttgttgcagaaggcgttgacggatcgtggtgttccgggtcgtggcgtgattgtggctgatactggggtgtatgtggaggcgtgtcaggcgttcctggagggtgtaaggtctggtgtggtttctcaccctagggctgattcgaggcgtgacatgttggatattgctgtgaggtcggctgtgcagaagaagaagggttctgcgtggggttggggttcctcgtttaaggatggttctgaggttcctttggaggctgtgtctttggcttatcttggtgcgaagatggcgaaggctaggcggcgtgaacggtctggtaggaagcgggtgtctgtggtatgaactcggatgagttggctctgattgagggcatgtttgatcgtatccaaaggttgtcttcgtggcattgccgtattgagggctactatgagggctctaatcgggtgcgtgatttgggggtggctattcctcccgagttgcagcgtgtgcagacggtggtgtcgtggcctggtattgctgtggatgctttggaggagcgtctggattggcttggctggactaatggtgacggctacggcctggatggtgtgtatgctgcgaatcggcttgctacgacttcgtgtgatgtgcatttggatgcgctgatttttgggttgtcgtttgtggctatcattcctggcggtgatggcactgtttctgttcgtccgcagtcaccaaagaattgtacgggcaagttttctgccgatgggtctcgtttggatgctggccttgtggtgcagcagacgtgtgatcctgaggttgttgaggctgagttgttgcttcctgatgtgattgttcaggttgagcggcggggctcgcgtgagtgggtcgagatgggccgtatcgtgaatgtgcttggtgcggttcctttggtgcctattgtgaatcgtcgccgtacgtctaggattgatggccgttcggagattacgaggtctattagggcttacactgatgaggctgtgcgcacactgttggggcagtctgtgaatcgtgatttttatgcgtatcctcagcgttgggtgactggcgtgagtgcggatgagttttcgcagcctggctgggtcctgtcgatggcttctgtgtgggctgtggataaggatgatgacggtgataccccgaatgtggggtcgtttcctgtcaattcgcctacaccgtattcggatcagatgcggctgttggcgcagttgactgcgggtgaggcggctgttccggaacgctatttcgggtttatcacgtctaacccacctagcggggaggctttggctgccgaggaatctcggcttgtgaagcgtgctgagcggcgtcaaacgtcgtttggtcagggctggctgtcggttggttttttggctgccaaggcgttggattctcgtgttgatgaggccgcgttttttggtgatgttggtttgcgttggcgtgatgcttcgacgcctacccgggcggctacagctgatgctgtgacgaagcttgttggtgccggtattttgcctgctgattctcgtacggtgttggagatgttggggcttgatgatgtgcaggttgaggctgtgatgcgtcatcgtgctgagtcgtctgacccgttggcggcactggctggggctatatcgcgtcaaactaacgaggtatgataggcgatggcttcgggggttgaggcgaggcttgctgcgactgagtatcagcgtgaggcggtcaggtttgctgggaagtatgcgggctattattctgagcttggtcgtttgtggcgtgccggcaggatgagtgacacgcagtatgtgcgtttgtgtgtggagttggagcgtgccggccatgatggttcggcgtcgttggctgccaggtttgtgtcggattttcggaagcttaacggtgtggatcctggtttgatcgtgtatgacgagtttgatgctgccgccgcgttggctaggtcgttttcgactatgaagattcttgagagtgacccggatagggcgaatgacacgattgatgcgatggcggcgggttttaatcgggctgtgatgaatgctggccgtgacacggttgagtggtctgcgggtgcgcagggtaggtcgtggcgcagggtgactgatggtgatccgtgcgcgttttgtgccatgttggctacgaggtcggattatacgacgagggagcgggcgcttactactggtcatactcggcgtcataagcgtgccggtaggcgtccgtttggttcgaagtatcatgatcattgtggttgtacggtggttgaggttgttggcccttgggaaccgaatagggctgatgccgagtatcagaggacgtatgagaaggctcgtgagtgggttgatgatcatgggttgcagcagtcgcctggcaatattttgaaggctatgcgtactgttggcgacatgagatgatggtttccggttgtgtgccgccggttattggtgcacagggttgtctcccgcacgggggtcaacaatgttgtgttgttttccgcaaggagtgtagggttaggctatggccgatcagagtgttgaggaacagaatgttgacaatgatgttgtggagtctggaaaggataacggcattgttgatacggtaaaagacgatggcgggcaggaggtagccgacaatcagttgaagaatgaaggcggtgataagccgtctgggactgattggaaggcggaggctcgcaaatgggagtctcgtgctaaaagtaattttgctgagctagagaagcttcgctccacgggtgataattcagagtctactattgatggtcttcgtcgtaaaaacgaggaacttgagagtaggctgaacgagcttgttttggagggtgtgaagcgtgaggtggccaccgagcatggcctctcggctgatgctgtagctttcttgtctggtggtgatcgtgagtcgcttgccgagtctgctaaagctcttaaggggctgattgaccatagtggtagtggtggcgctggtgtgcgccgtcttgcggggagtgcccccgtgactgatgagaagcatcgcgagggtgtcgctttcgtggatgctttagtaaacaattctaggagatgatttatcatggctgacgattttctttctgcagggaagcttgagcttcctggttctatgattggtgcggtgcgtgaccgtgctatcgattctggtgtgcttgctaagctgtcgccggagcagccgacgattttcgggcctgttaagggtgccgtgtttagcggtgttcctcgcgctaagattgttggcgagggcgaggttaagccttccgcatcggtggatgtttcggcgtttactgcccagccgatcaaggttgtgactcagcagcgtgtctcggacgaatttatgtgggctgacgccgattaccgtctgggtgtgcttcaggatctgatttcgcctgctctgggtgcctcgattggtcgcgccgtggatctgattgctttccatggtatcgatcctgctacaggtaagcctgctgcggctgtcaaggtgtcgcttgataatacgtcgaagacggttgatgcaaccgatagtgctacggctgatcttatcaaggcggttgggctgattgctggggccggtttgcaggttcctaacggtgttgctttggatccggcgttctcgtttgctctgtctactgaggtgtatccgaaggggtctcctcttgccggtcagccgatgtatcctgcagctggtttcgcggggcttgataattggcgtgggctgaatgttggtgcttcttcgactgtttcgggtgccccggagatgtcgcctgcttctggtgttaaggctattgttggtgatttctctcgtgttcattggggtttccagcgtaacttcccgatcgagctgatcgagtatggtgacccggatcagactggtcgcgatttgaagggccataatgaggttatggttcgtgccgaggctgtgctgtatgttgcgattgagtcgcttgattcgtttgctgttgtgaaggagaaggctgccccgaagcctaatccgccggccggtaactgatttattgtagcggtgatatgtatatgtgcagggggtggtgttgatgggtatcattttgaagcctgaggatattgagcctttcgccgatattcctagagataagcttgaggcgatgattgccgatgtggaggctgtagctgtcagtgtcgccccctgtatcgctaaaccggatttcaaatataaggatgccgctaaggctattctgcgcagggccctgttgcgctggaatgataccggggtttcgggtcaggtgcagtatgagtcggcgggcccgtttgctcagacgacacggtcgaatactcccacgaatttgttgtggccttctgagattgctgcgttgaagaagttgtgcgacgagagtggtggcgctggtaaagcgttcacgatcacacccacgatccgtggtggatatgctcattctgaggtgtgttccacggtgtggggtgagggttgctcgtgcgggtcgaatattaacggctacgctggccctttgtgggagatatgatatgaccagttttccttacggtgaaacggttgtgatgcttcaaccgactgttcgtgtcgatgatttgggcgacaaggtggaggattggggtcatcctgtcgagactgtgtaccataatgtggccatctatgcttccgtttcgcaggaggatgaggctgcggggcgtgactcggattatgagcattggtcgatgctttttaagcagcctgttgtgggtgccggttatcgttgccggtggcgtattcggggtgttgtgtgggaggctgacgggtctcctatcgtgtggcatcacccgatgtccggttgggatgctggtatgcaggttaatgtgaagcgtaagaagggctgatgggttgtggctcaggatgtgaatgtgaagctgaacttgccgggtattcgtgaggtgttgaagtcttctggggtgcagtcgatgttggctgagcgtggcgagagggtgaggcgtgcggcctcggcgaatgtgggcggtaatgcttttgatagggcccaataccgtaatggtttgtcgtcggaggtgcaggttcaccgtgttgaggctgtggcgaggattggcaccacctataagggtggtaaaaggattgaggcgaagcatggcacgttggcccggtcgattggggctgcgtcgtgatcgtttatggtgatccgcgtgtgtgggctaaacgtgtgctcaaggatgatggctggctgtccgatataccttgtactgggacggtgcctgaggatttcagcggtgacttgatttggttggcgttggatggtggtccgcagttgcatgttcgtgagcgtgtttttttgcgggtgaatgtgttttctgatatgccggatcgtgctatgtcgctagctaggcgtgttgaggctgtgctggttgatggggttgacggtgatcctgtagtgtactgtaaacggtctactggccctgatttgctggttgatggtgcacgttttgatgtgtattcgctttttgagctgatatgcaggcctgtcgaatccgagtaaacgttttgttttgatattgttgtttgtttttgtttgatattatttttgggggttgtgatggctgctacacgtaaagcgtctaatgttcgctctgctgttaccggtgacgtctatattggtgccgctcatgctggtgacactattgatggtgttgggaagattcctgacggtcttatcgctttagggtatctgtcggatgacgggtttaagattaagcctgagcgtaaaacggatgatttgaaggcttggcagaatgcggatgttgttcgcactgtggctacagagtcgtctatcgagatttcttttcagctgattgagtctaagaaggaggttattgaactgttttggcagtcgaaggttactgccggagccgattcgggttcgttcgatatttctcctggtgccaccacgggtgttcatgccctgttgatggatattgttgatggggatcaggttattcgctactatttccctgaggctgagcttgttgatcgtgacgagatcaagggcaagaatggcgaggtgtacgggtatggtgtgacgttgaaggcttaccctgctcagattaataagaagggtgatgcggtgtctggtcgggggtggatgacggctttaaaagctgatactcctccgactcctcctccggccccggttcctccgaagcctcagccggatccgaatcctccgtccgataactgatacacgattttaggggattgttgatagatgagtgacactggttacacgttgaagattggtgaccgtagctgggtgttggctgatgctgaggagacggcgcaggctgttcctgcccgcgttttccgtcgtgccgccaggattgcgcagtctggggagtctgcggatttcgcccaggttgaggtgatgttttctatgttggaggctgccgccccagctgacgcggtggaggccctggaggggcttcctatggttcgtgtggcggaggttttccgtgagtggatggaatacaagcctgacggtaagggtgcctcgctgggggaatagtttggctccacggcctgattgatgattatcgtggggccatcgaatacgatttccgcaccaagtttggtgtttctgtttatagtgttggtggccctgtgatgtgttggggtgaggctgtccggctggctggcgtgttgtgtaccgatacgtctagccagttggcggcccacctgaatggttggcagcgcccgtttgagtggtgtgagtgggctgtgttggacatgttggatcattacaggtctgctaatagtgaggggcagccggagcctgtggcgaggcctacggatgagcgtagggcccggtttacgtctgggcaggtggacgatattttggcgcgtgttcgtgccggtggcggggtgtctcgcgagattaatattatggggtgaatagtgtatgtctggtgagattgcttccgcatatgtgtcgttgtatacgaagatgcctggtttgaagtcggatgttggtaaacagttgtcgggtgttatgcctgctgagggtcagcgttcgggtagcttgtttgctggcgggatgaagttggcgcttggtggtgcggcgatgatgggtgccatcaatgttgctaagaagggtctcaagtctatctatgatgtgactattggtggcggtattgctcgcgctatggctattgatgaggctcaggctaaactgactggtttgggtcatacgtcgtctgatacgtcttcgattatgaattcggctattgaggctgtgactggtacgtcgtatgcgttgggggatgcggcttctactgcggcggcgttgtctgcttctggtgtgaagtctggcgggcagatgacggatgtgttgaagactgtcgccgatgtgtcttatatttcgggtaagtcgtttcaggatacgggcgctatttttacgtcgattatggcgcgcggtaagttgcagggcgatgacatgttgcagcttactatggcgggtgttcctgtgctgtctctgttggctaggcagactggtaaaacgtctgctgaggtgtcgcagatggtgtcgaaggggcagattgattttaacacgtttgcggctgcgatgaagcttggcatgggtggtgctgcgcaggcgtctggtaagacgtttgagggcgctatgaagaatgttaagagcgccctgggttatttgggtgctacggctatggccccgtttttgaacggcctgcggcagatttttgttgcgttgaatccggttattaagtctatcacggagtctgtgaagcctttgtttgcgtcggtggatcaggggattcagcggatgatgccgtctattttggcgtggattaaccgtatgccggctatgatcactcgaatgaatgcacagatgcgcgccaaggcggagcagttgaagggcatttttgcgaggctgcatttgcctgttcctaaggtgaatttgggtgccatgtttgctggcggcaccgcagtgttcggtattgttgctgcgggtgttgggaagcttgttgcggggtttgccccgttggctgtgtcgttgaagaatctgttgccgtcgtttggtgctttgaggggtgccgctggcgggcttggcggcgtgtttcgcgccctgggtggccctgtcggtattgtgatcggcttgtttgctgccatgtttgctacgaacgcccagttccgtgccgctgtgatgcagcttgtgggggttgttggccgggctttggggcagattatggtcgccttgcagccactgttcggtattgttgctggcgtggttgccaggttggcgccagtgttcggccagattatcggtatggttgctggtttggctgcccggctggtgcctgttattggtatgcttattgcccggctggttcctgttatcacccagattattggtatggtaacccaggttgctgccatgttgttgcctatgctgatgccggttattcaggctgttgttgctgtgatacggcaggttattggtgtcattatgcagttgatacctgttttgatgccggttgtgcagcagattttgggtgctgtcatgtctgttttgccgccgattgttggtttgatacggtcgctgataccggtgatcatgtcgattatgcgtgtggtggtgcaggttgttggtgccgtgctacaggtggtggcccgtattattccggttgttatgccgatttatgtttcggtgattggattcattgccaagatttatgctgcggttatcgtttttgaggctaaggttattggcgctattcttcgtactattacgtggattgtgaatcattcagtgtctggcgtgaggtctatgggcacggccatccagaatggctggaatcatatcaaatcgtttacgtcggcgtttattaacggtttcaagtcgatcatttctgccggtgttgccgcggttgtggggttttttacgcggcttggtttgtcggttgcctcccatgtgaggtctggttttaactcggcccgtggtgcggtttcttctgcgatgaatgctattcggagtgttgtgtcttcggtggcgtctgctgttggcgggtttttcagttcgatggcgtctcgtgttcggaatggtgctgtgcgcgggtttaatggtgcccggagtgcggcatcttctgctatgcatgctatggggtccgctgtgtctagtggtgtgcatggtgtgctgggttttttccggaatttgcctggcaatattcggcgtgcgcttggtaatatggggtctttgttggtgtctgctggccgtgatgtggtgtctggtttgggtaatggtatccggaatgctatgagtggcctgttggatacggtgcgtaatatgggttctcaggttgctaatgcggcgaagtcggtgttgggtattcattctccgtctcgggtgtttcgcgaccaggttggccgtcaggttgttgccggtttggctgagggtattactggtaatgcgggtttggcgttggatgcgatgtcgggtgttgcttcgcagcttccggatgctgtggatgcccggtttggtgtgcggtcgtctgtgggctcgtttaccccgtacgaccggtatcggcgtgcgagtgagaagagtgttgtggtgaatgttaacggacccacgtatggtgatcctaacgagtttgcgaagcggattgagcggcagcagcgtgacgctttgaacgcgttggcttacgtgtgattgggggtgttgtgcatgtttattcctgacccgtctgatcgtgccggtttgactgtggattggactatgtttccgttggttggtaatgctccggagcgtgtgcttcatttgacggattatacggggtcgtctcctgtcatgttgttgaatgattcgttgcgcggcctgggtgttcccgagattgagcatttttctcaaacacatgttggggtgcacggctcggagtggcgcgggtttaatgtgaagcctcgcgaggtgacattaccggtgttggtgtcgggtgttgacccggatccggatggcgggtttcgtgacggttttttgaaggcgtatgacgagttgtggtctgcttttcctcctggcgaggagggggagttgtctgtgaagactcctgccggcattgagcgtgtgttgaagtgccggtttgattcggctgatgacacgtttacggtggatccggtgaacaggggttatgcgcgttatctgttgcatttgacggcttatgacccgttttggtatggggatgagcagaagtttcgtttcagtaacgcgaagttgcaggattggttgggtggcggccctgtcggcaagaagggtacagcgtttcctgtggtgttgacgcctggtgttggttcgggttgggataacctgtctaataagggtgatgtgcctgcgtggcctgtgattcgtgtcgagggccctttggattcgtggtctgtgcagattgatggtttgcgtgtgtcatcagactatcctgtcgaggagtatgattggatcactattgacacggatcctcgcaaacagtctgcattgttgaacgggtttgaggatgtgatggatcgcctgtctgagtgggagtttgcgcctattcctccggggggttctcggagtgtgaatattgagatggttggtttgggtgccattgttgtgtcggtgcagtacaggtttttgaaggcttggtgaatggttgatggctggtcttgttccgcatgtaacattgtttacgcctgattatcgccgtgtggcgcctatcaatttttttgagtcgttgaaactgtcgttgaagtggaatggtttgtccactttggagttggtggtgtctggggatcattccaggcttgacgggttgacgaggccgggtgcacggctggttgttgattatggtggtggccagattttttctgggcctgtgcgtaaggttcatggtgtgggtccgtggcgttcttcgcgggtgactatcacgtgtgaggatgatattcgtctgttgtggcgtatgttgatgtggcctgtgaattatcgtcctggtttggttggtatggagtggcgtgccgacagggattatgcccactattcgggtgcggctgagtcggtggctaagcaggtgttgggggataatgcttggcgttttccgcctggtttgtttatgaacgatgatgagagtcgtggccgctatattaaggattttcaggcccggtttcacgtgtttgccgataagttgttgccggtgctgtcgtgggctcggatgactgtcacggtgaaccagtttgagaatgtgaagtttgatcagcggggtttggtgtttgattgtgtgcctgctgtgacacggaagcatgtgttgactgccgagtcgggttcgattgtgtcgtgggagtatgtgcgtgacgcccctaaggctacttcggtggttgttggtggccgcggcgagggtagggatcggctgttttgtgaggatgttgattcgatggccgaggatgagtggtttgatcgtgtcgaggtgtttaaggatgcccgtaacactgattccgagaaggtgtctctctttgatgaggccgagcaagtgttgtccgagtcgggggcctcgtctgggtttaagatcgagttggctgagtcggatgtgttgcggtttgggcccggcaatctgatgccgggggatttgatctatgttgatgtgggttctggccctattgcggagattgttcggcagattgatgtggagtgtgattcgcctggtgatggttggacgaaggtgacaccggttgcgggggattatgaggataatccgtcggcgttgttggcgcggcgtgtggctggtttggctgcgggtgtgcgggatttgcaaaaattctaaaaagattaggggtttgttgtgggtattgtgtgtaaaggttttgatggtgtgttgaccgagtatgattgggctcaaatgtctggtctgatgggtaatatgccgtctgtgaaagggccggacgattttcgtgtcggcacgacgattcagggtgccacggtgttgtgtgaggttatgccggggcaggcttgggctcacggggtgatgtgcacgtcgaatgatattgagacggtgacggggcagcttccgggcccgggtgagacccgctacgactatgttgtcctgtcgcgggattgggaggcgaatacggccaggttggagattgttcccggtggccgtgcggagcgtgcccgtgacgtgttgagggctgagcctggcgtgttccatcagcaactgttggcgactttggtgttgtcgtctaacgggttgcagcagcagcttgacaggcgtgccgtggcggctagggttgcgtttggggagtctgcygcgtgtgatcctacccctgtggagggtgaccgggtgatggttccttcgggggctgtgtgggctaaccatgctaacgagtggatgctcctgtctcccaggattgagacgggttctaagcagatccagtttggcgggtctgctgtgtatgcttacacgatcccgtttgatcgcccgttcactagtccgcctgttgtggtggcgtctatggctacggcggctgggggcacgacccagattgatgtgaaagcctacaatattactgccaaggattttagtttggcgtttattacgaatgacgggtctaagccgaatggtgtgcccgcaatagctaactggattgctgtcggcgtgtgactgtacaggtgttgtggcggatgttgtaatgttggggggctgtggtgtcgtggtttactcctgcactggtggcctctatctgtaccgcgttggccacgattttgggttcagttcaggcggtcacatctaaatcgaggaagcgtttacgcaggctatctgcgcaggttgatgcgatggaagagtatatgtggggtgtgcggcgtgaggtgcgccggtttaacgcgaggcttcctgatggggtggagcctatgcatcttcctgatttgcctgagtttttgaaagatactgttgatggtggaggtgagtagggttgagggagttggaggaggagaagcggcagcgccgcaattttgagaaggcttcactggtgttgttgtttttgtcgcttgtgctgttgatggtggttgctgggggtgctttgcgtttcggatcgctgtcttctgagcgggattctgagcaggcgagggcccagtcgaatggtacagccgctaaaggtttagctgcccgtgtgaagcaggtgtgtgcctctggtgggcaggagtctgtgcggcttcaccagtctggcttgtgtgtggatgctcagcgtgttgaackgmgtgtgcagggtgtgccgggtcctgccggtgtgcgcggcccgcaagggcccgccggtgtgaacggccgggatggtgttaatggttcggccgggctggttggccctgttggtccgcagggttctccgggtttgaatggtgtgaagggtcctgacgggctgcccggcagtgacggccgggatggtgtcgatggtgtttcgggccgtgcaggcgtggacggtgtgaacggcgctgatggcaaggatggtcgtgatggttctgctggtgagcgtggcgatgtggggccttcgggtcctgccggcccccctggcgcgcagggtgagcgtggccctgctggtgtgaacggatccgatggtaaagatggtaaggatggcgctgatgggcgttcggtgatatcggtgtactgttccgggggccgcctggttgtgaaatatagtgacggtacggcctctaccgtgtcgggttctgcagcctgtgagagtgtgaaaccgtcacctgtggttaccgtatcatcccataggtgaacaagaagagggaagggtgttactagtgttggtcgtgtttgggggtggtgtgtggtgagatacattccagcggcgcatcactcggccggttcgaatagtccggtgaatagggttgtgattcatgcgacatgcccggatgtggggtttccgtccgcttcgcgtaagggtcgggcggtgtctacggcgaactatttcgcgtccccatcggcgggcggttcggcgcattatgtgtgtgatattggggagacggtgcagtgcctgtcagaggggactattgggtggcatgccccgccgaatccgcatagtttgggtatagagatttgcgctgatggtggttcgcacgcctcgttccgggtgccagggcatgcttacactcgtgagcagtggcttgatccgagggtgtggcctgccgtggagaaggccgccatcctgtgtagacatttgtgtgacaaatataacgttccgaaaaggaagcttagtgcagccgatttgaaggccggtaaacgtggtgtttgcggccacgtggatgtgacggatgcgtggcatcaatcggatcatgacgatccggggccgtggtttccgtgggacaggtttatggccgtcgtctgcggcggcagtggagatagtggggagttaactgtggctgatgtgaaagccttgcatgatcagattaaacaattgtctgctcagcttactggttcggtgaataagctgcaccatgatgttggtgtggtacaggtacagaatggtgatttgggtaaacgtgttgatgccctgtcgtgggtgaagaatccggtgaccggaaaactgtggcgcacaaaagacgccctgtggagtatctggtattacgtgctggagtgtcgcagccgcatcagtaggctggagtctgctgttaacggtttgaaaaagtgatggtggtttgttgtgggtaaacagttttggttaggtttactggagcgggcggctaagacttttgttcaaacgtttgttgcggtgttgggggtgacggcgggtgtcacgtatactgcggagtcgtttcgcggtttgccgtgggagtctgccctgataacagcaacggtggctgcggtgttgtcggttgctacatcgtttggtagtccgtcgtttgtggccggcaaacctaaaaccacggttgtggatgctgggcttgttccacccgacgatgggggtttggttgagcctcactcggttgatgtgtcggatcctggcatgattgagcctgtagatgatgcggatcttggtgtgggctatgtgccgaaacacgctgccgagtcggaggttggcacggtagagtctactgttgcataagtgaatatagatgtgtgccccagcggtgctgccacggttgtgtggtggttgccgctggggcactatttctgttttatgcggtgtggctatgattcgttgctgtcgatggtgtcttcgagcatctggtacaggtggaggcaggtgcagatcgtttcgctggcctggtctagaacgttccggccgataacgtttttgtggttgtcgcggtggcggatgatagcccacatgatctcgtcggctgccgcctgtaatagtttggcctggtatgcgattccggcgagccagtctagtgcttccgggcttgcctgtgtgtcgtctggaatgccgcgggtgttactgttgcttgtggggtgtcctgcactgtcgcatagccataggatttcgctgcactcgtctagcgtgtcttggtcgatagcgagatcgtcgaggctgacattgttgacggtaaggttcacgttgtcgagggagatgggtacaccgtactggttttcgacactgtcaacaatgttttgtagttgttgcatgttggtgggctgttgttggacgatacggtgtatcgctgtgttgagggtggtgtaggtgatgttgtgtgtgttgttcatggttttatcccatccctgtgctgtcgtcgttttcgtctggcatgtagtatgtgctgtttgcgtactcggttaacgtcatcagtgtttggtctgcccactgtttcacggtttgccgggtgacacccaatcgttgggcggctgtggcgtaggtttggtcgtatccgtagacttcccggaatgctgccaacctagctaaatgttttcgctgtttggatggttcacaggatagtgtgtagtcgtcgatggctagctgtagatcgatcatggtggcaatgttgttgccgtgatgctggggggcggttggtgggggtggcattcctggctccacggagggtttccatgggccgccgttccagatccattgcgcggcttgaatgatgtcggcggtggtgtaggttcggttcactggtcatcccctgaacaggtcgttggtgttggtggtgtcgaatcgtccgacgcagtggcagtagtcgtacatgagtttgataatgtgttggtggtctcccaaataggtgtttccgctgatgctgtaggtggctgtgccgtctttactaatggtgtatttggcggtgatggtttcggggttttcggtgtcggtgatgattgctgtggtggtggcgcctactgtttgtagcacggtggtttgagttccgtcgtcgatggtggttttaaccatggtgtgtgttctcccctttcagttgctggtttggttgtcggctagatgaatgatatcgggtaagggtttcggctggtcgaggtgttgtatggttttgttggctaaacgtttggctaccctgtaacacattttggtgtagtgtttgttgtctaggttgtggtattgttcccgcaccgcaatatatagtagagagtcttggtacaggtcgtctgcactgattgcggggtagtgtgcggctgttttggtgcatgcccggttgagtgtgcgtagatgatggtctgtggcccaaacccacgatgcggtggtggcgaggtctgctttggttggtcgtcggctcatggcatctctttcatcgggctatctggtagttgtttggtgttttgttgttgatagtgtagcacacgagtccggggtttccggtggtgcccgtcttgtgccggtaccatgtggattcgccttccatggaggggcattggatgaaggtgcgttgtccttgctcggagatttctaggtgatgccgatgcccggccatgagaatattagatgtggtgccgttgtggaattcttggccgcgccaccaatcatagtgtttgccggtgcgccattggtggccgtgggcgtgcaggatggtagccccggctacgtctacggtggtggtcatttcgtctcggctggggaaataaaagtgtaggttgggatactggttgttgagctggtaggcttctgcgatggcgcggcagcagtccacatcgaaggagtcgtcgtaggtggtgacgcctttgccgaatcgtacggcttcgccgtggttgccggggatggatgtgatggtcacgtttttgcagtggtcgaacatgtggacgagttgcatcatggccatgcgggtgagcctgatttgttccgtcaagggggtttgtgtgcgccaggcgttgttgccgccttgtgacacgtatccttcgatcatgtcgccgaggaatgcgatgtggactcgctcgggtttgcctgcttgttgccagtagtgttttgcgacgatgagggagtgtaggtagtcgtcggcgaagtgtgatgtttctccgcctgggatgcctttgccgatttggaagtctcctgccccgatgacgaaggctgcggtgctgtagtcggtgcgggtgtccggttcgggttttgggggtgcccattcggctagcttgtcgacgagttcgtctacagggtaggggttggttgcgggttggtggtcgatgattttttgtatggatcggccggtttctccgttcggtaaggtccattcagagatgcgtgtgcggcgcacggtaccgttggctagattgtcgtcgatggtgtcgatggcgttgtcgtggttggctagttgtgtgaggagccggtctatgttgtctatcactgggtatcctcctcgtgtggggtggtgttggcttgtttgcggcggtagtctttgatgacggtggcggagatggggtatccggcttgggtgagttgttgtgctagccaggaggcgggtatggacctgtctgcgagcacgtctgcagccttatcgccgtagcgttggatgagggtttcagttttggttgccatggtgtcctatcggttgtgtggtgggctgccatcctgtgcggcagtcgccgtcgtgtcctggtttgcgtgtgcaccacgatgttgttccgtctgtgtggttgagtgttttaccgcacatgacgttttgtagatgctctggcagctggtcatcctggttgctggtttgtgtgtcgaagagtgttttttggttggtgaaatgctcggacacggtgccgttrtgcacgggtagtatccatgttttccattgttgttgtagccgggtgttccagtggaattgtttggccgcgttttcggcctgttttaaggttttgtagtagccgactagtatgcgctggtgttcactgtcgggtgggttttggcctcgccagtattgtgccgctacggcgtaccggttgctggctgtgaagatttgccagcagtattcgataatgtgttgcaatactgtgtctggcaggctgtcggggttgatggtgatgttttgggtgatgatgccacggatggcttgccggtttttggtggtgggtttgaacgagatgctcacgatagtaccggctgctggtcttgcatgaactggttgaaggtgttgttcccggcatgttgggcttgtgtgatttgttggtcagaccagtcggggtgttgctgtttgaggtagtgccagtggcacgcattgtaggtttcgttttgtagccgtgtgagatggttttcggtgatgatttgtttccacattgtccatgatacgtctagccggtcgaggatttcaagggctgggatgttgaattggtcgaggaagaggatttcgtgggtgtagtagtttttctcgtattggtcccatccgcttcggtgcctgttggactggtttttggggtaggcttcccggcatactttgtgtaaacgtttggtcatgtcgtcgggtaggttaatgtcggggttggcgcggatcatggatcgcatcccatcataggtggtgccccaggtgtgcatgatgtaggtggggtcttctccgtcagcccatttttctgcacagatggcgaggcggatacgcctcctggctgcttggctaatgttgcgccggttggggatggggcacgtgtcgaggggatccatgatgttttagtgtacctttctagtttcgtgttgttgacgtgttttactgtagcacagtgtctagtgcttgtgtcaaccctgtttttccggcctgcaggtaggtgtctgtgacatcccccagggtgaggggcacatgggtggcttggggtagtgctgcctggagggtttgggccatctggtctcccgctttgtctgggtcggaccagatgtagatgtggtcgtagccttcgaagaatttggtccaaaagttttgccacgaggttgcgccgggtagggcgacggccgaccatccgcattgttcgaggatcatggagtcgaattcgccttcgcaaatgtgcatttcggctgccgggttggccatggcggccatgttgtatatggagcccgtgtctcctgccggggttaaatatttggggtggttgtgggttttgcagtcgtgctggagtgagcagcggaaacgcatttttcttatttcggctgggccgccccaaacggggtacatgtatgggatggtgatgcactggttgtagtcttcgtggcctgggatggggtcattgttgatgtatccaaggtggtggtagcgggctgtttcttcgctgatgcctcttgccgagagcaggtcgagtatgttttcgaggtgggtttcgtagagggccgaggctttctggattcggcggcgttccgcaatgttgtatgggcgtatgctgtcgtacattcgggttttcttcttctaatcgttgttgtagtttggcgagtccgcctccgacaccgcatgtgtggcagtaccagacgcccttgtcgaggttgatgctcatggagggctggtggtcgtcgtggaacgggcagaggatgtgttgctcgtttttggacggattgtagcgtatctggtaggtgtcgaggaggcggcaggtgtcagaggtgtgggaggagctcgttgagggttgataccacatatgcttcgctccatggcttgttgcgctgtttcatcactacgagtccgatggtggactggctttctcggtttcggtgggtttcgtagttgcgtgcctcccggctggcttgtttcacgaattcggctaggtgtggctggccggctttggcttctatcacataggttttgtggctggttgtgaggatgaggtcgccttcatcctctttaccgttgaggtggaggcgttcgatattgtggccggtgtcgcgtagctggtggaggagtcgtgtttcccactcggccccagctcgcctattcctggattgctgtgtagccatcatagtcctttgtgtgttgtggtcatgttccagggctgtttttcggcgagtggcccgaagaatgtgtattcggggtaggctcgtagccgctcgtatcgggttccgtcggggctggatttgcctgtgcgctgttttagcactgcgatgcgtgcctctgccggtatcgtgagcccgttgccgttatcctcgccaccatacagtgagactccgaggatgagttgtggtttttcggagaggccgtttttgatttctcgccgggcgggcgggtgttcgatgtcggagccggttttgtcggttgcgtggtgggtgacgatgatggtggagccagtatctctacctaatgctgtgatccattgcatggcttcttgctgggcctggtagtcggattcgcagtcttgaatgtccatcaggttgtcgataacgatgatgggtgggaaggtgttccacatttccatgtaggcttgcagttccatggtgatgtcggtccaggtgatgggtgactggaatgagaatgtgatgtgttggccgtggtggatgctgtctcgatagtattctggcccgtagtcgtcgatgttttgttgtatctgtgtggtggtgtgttgggtgttgagtgagatgattcgtgtggaggcctcccagggtgtcatgtcccctgatatgtagagggctggctggttgagcatggcggtgatgaacatggctagccctgatttttggctgccggagcgccccgcgatcatgactaggtcccctttgtggatgtgcatgtcctggttgcggtagaggggttctagctggggtatgcggggcagctcggctgcggtttgggaggccctctcgaaggatctttgtagagagagcatcggagccttaatctatctatcggttggatgttgttttggtggtcagatggagtcgatatcgatgtcagcctcagttgaggctgtggtgtcgtctagctgaccgttatcgcgcttgtctacgtattcggcaaccttatcgtagatggcgtcgtctaatggtttgagtacgaccgcgttgaacccgtttttggtgcgtacggtggcgagtttgaaggcctgctcttcgccaaggtatgcttcgagttcgcggatcatggagtgtgkgcggtcgttgttgcctcgcgctttctcaataatagcgttggggatggtttctggggtgccgttgttgagatcgtctagggtgtggaagatggtgacatcagcatagatgcgatcagcggtctgtccgccgtagccttcagtgttgtgttccacgtcgtgcactttgaaggcgatggcggtggcgtcctggtttttggacgggttgaagaaggtgctgttattgctgttgcggtagttggcaagtcccataatggtgttatcctttactgttgtgtctgttattgttggcttatattggtttatcgggtgaggctgtttcgtttagtgcggaaagcctcggacacgtcactgttactggtgatgatctttttgtactgttttagaaggtctgctagctgtgctttgctggtggctttgttgatccggtcaatgatgatgtcgttttcctgattggcgattttgtttacgtagtctttggcggcctgattgtatcggtcttggaggatgatggatgcgctagctatgagggttgcgaggtcccagtctttcgatacggtttcgtctttcaatcctcccagcaggtcgatgatggcctgttttgtctgctctgctgtgtctcccctaatgacggtccatggtgcagcatagtctccaccatatttgagtgtgatagtgagtcgatcattgtctgtggtgtgctcgtcggtcatgtgttttccttttctttgttttcggcttctggaggctgtacggtggtttctaccgggtatctgtacgagttttttccgttgacggcccagcaggcgtctcgtacggggcatcctttacagagtgctgtgacgtggggtacgaagatgccttggctgattcctttcattgcttgactgtacatggatgatacatgccggtaggtgttgttgtcaagatcgtacagttcggtggatgttccctgcttggcggactgtttgtctgttttggttgatgcgggtgtccaaaacatgccttttgtcacatcgttgccgtgttgggcgagcatgtaccggtaggtgtgcagctgcatactatcagccggtaggcgcccggttttgaggtcgaggatgaatgtttcgccggtgtcggtgtcggtgaaaacgcggtcaatatatccgactatttttgtgtcatcgtcgaggatggtttctaccgggtattcgatgcccggctcgccgtcaataacagcgatagcatattctggatggttgcgcctccatgttttccagcggttcacaaaggtttgtccgtagagtatccaccagtcgtagtctttcttgtgtggcccgcccgactcgcacatgtttttgcatattctgccggagggtttgatttctgtgccttcggatttggcgagggcgatttgggtgtcgaaaatgtttttgaaggatgagagtttgtctggtagtgcagggtattcggtgggattgtacaggtggaggtcgtattgttcggtgatgtggtgtatggcgcttccggctatggtggcataccaggtgtggtgttgggcgtggtagccgtgttggaggcgccatttttctccgcattcggcccactgtgacagtgatgagtaggagatgtggcctggatggttgatggttttcggatattgtgctagaggcattacttgtcgcctttgtgggtgttccatgggttgcgggtgtcttggcctgcatcgtgttgctggtaggcaaggagtgcgaggcagtgccaggcagcatgggccagatgcggtagcccggattcatcatcgaggttgttgccttgctgccaggatagcacatggcggtagagggcatcgacactgtggctccacgggtatcctccggtccagttgttgtcgccgtatttggtggcaccgtagcctgcaacctcgcctagggcgtgcaaggctgcggggtcgatgagggagagcctgcagagtttcaattcttttcgggcaccgctgttggggtcggtgtacatgcgggtgggctcatccatgagatgtgtgctccttaagagtgggttactggttgttgtcgtgagctagggcgacggcgagaataatgatggcgagggtttcggctatcaggatgggtgttgtgatcatttagtgtctcggggatggtaggtgagtgttgaggcgcccaggagggtggcgagggcgcatgcggcaataatagcgagggcggctttgtggctggtgccggttgcgtacatccatgtgatgatggcgccttggatccaggcgaggctggtgaagaacgtttcgtagctgtgtagctcaatgttgttgttgggtgtgttcatgcttgctcctgaagaatggtgttgatggttttataaatgttgtacaggtcggtttcgatagataacagttgatggatttcgtggtcgagatcaatgtctgggttgagggtgttgatgcgggaggcaatatcggtggctgtgcggagtgtgccgccggtgtggtgaataatgtgtgccgtgtcggcgaggcctgtggtgacagcgtagcgggagaggagaggcatagcggtccttgacggggttactgttgcgggttgatgttgaggtcggtgacgtgcgggtggtcttctgttccggtgacgaggcagtggacggtgactggtagtttggatgctcccggctggcggacggtggcgccgtagacgatggagaaggtgtctttaccaataattttgtggagttggaggtcgatgtcggggttgccgttccagttgacaccgtgtgcggcggccttctgctcagccttgtcattgcaggcgtgtgctgcggtgatcatggtgagtccggtggcggtttcttctccgcgggcttgggcttgcttgtgggttttggcttgttcggcttgtagggagcgggtggcggctgcctgccgtgccgctttctcggctttgcgctgttgggcggtttttggtgtccattctgtgttggctgtggttacctgtggtgcgggttgtgatgcgagtggggggttgtcgtcgggggctgggaggaaggatgcggcggcgatgatggcggctgtgatgcctgcgatggtgtagccttttttcttgttcatgactgttgtcccctttctggggtgttgttcgttgctgacatgatcaatacttccagtgactggacctcgtgtcaagactgcgctcaaatgttgtgagcgatccttgtgtggctaggggttttatcgggcacacagagtgagtagatggcctacgttgatgcggctcacattccagtagagttgtgtggcttcaccgccggtgagtggcttccactcgttgtggctgaacacggtgccatcggatgcgatgaatgtgttggggcgtagcttgtggagttcaatctctacgctctgccggtaggcttcggcgaggccctcaaaatccatgtggtcgcaggcgaggttttcgaggcgtgtcagatcgaagggtgtggggcagtcgtagctggcgggggtgtagagctgggtgaagtggtcggcaatcttgtgcatgatgatgtccttttcgttgctgataacgttgttgagggtttatcgggtggatgctttgaggatggcgtctacatcgatcatgtcgatgagatcgtggagttcctcagcttcgttctcggagaggtggcgccagttgggtggcccgtatagggcgccgtcgagggtgacagtccacatgggtcggatgagtcgtacggcttcttgtactttagcgtggtacatgcggcgcaccatatcgagatcgatgtcgtctgaatggtttccggtgaggctgtggaggctgagtgggtcgatttctgtctgcctgtagagggatgtgaaggatggggtgatgagtgtgccatccatgggtgatgttcctttctggattgtctgggtgggttgttgtggtttttatggtgtgagggttgtgatccatagtcaaggctgcgctcattcggattgagcgtttcatgctggagtgtctggtgtgacagatgtcacttaagcccttatggtctctctaagcgtctcaaatcttctgggggtaggattatgcagggttgaccctgctaatcgattctagggcccttctagggcgtctcaggggtatgtctgggtgatggcaggttcggtagatgatctagcgagtcaaggtgccgagctgagacataagatctatcatctaggtgtgtgagatgtatcacatcctcctggcttagtgtgcactcccgaggctactctgccgatctgacgtgaagggcgtagcccagaaatgccgtttaaagccttcacacggagcctaggagcgccgtgcagggtgggggctaggtatttatacccccagcacattctgatcgattctagacgcctcccagagcctgatacgcgatcagccatctcggcatagatcatcagcccctatcatggttagctaagcctcaactatgtggacagtgttggatactgtgggggaagaaggacacggtaaaagaaagaggggggagcatcagccttcaagccttaaggtcttagcgcttagcaccgatggtcttagcagttagcaccgagccctctcaagggctcggcatcagcccgaacaggcacagccctgaaaggagtacacgccatcagggaaggcttgagagtacgaggagccctagcgacgagtactcgaaagcctgagggaacaccctcagcactgatggggctagcgtgttcggaaaggacacaagagtgaagtgtgacagctgttcgggagtgaaacccgttctggctaggggtttcagtattaaccaccctcaaaggttacaagactctaagaaaatttaaggaaaagtttaggtttaatttttggacatttactaccaaaaacacccgtttacacccctcaaacccgcctatagagccaaatccaccagtttgactcatcccaggtggtgtatgctaggctggacaggtagccagctggacgcaaggccgaaatccgctgacgcggctttcacccttacatccatcagtctaccaaagacttaaacgcttcaaggctaagcgctaagcccctcagtacttagcaccgagcccttgagggggctcggcatcagtcttaaagctttaaacactttaagtaaacttaagagcttagcacttaaagttaattaataaccttaaaggcttacacacttagcactgagcccttcaaggctcagcatcagtataaagatcttaacacctaagttaagtataaaaccttaaaggcttagcacttaaggatataaacttaacatcagtgtttaagactttaaaacttaaaataactattaagacttaaagacttataagactttaaagaccttaagtacttaaagttaaccatcagtcttaaactttaatattataacctataagtcttaaagcttataggtataataatataatataagttataaaagttttagaagagctaaggggttaacttctttacttctctactctctttggttctttctctcttctcttcttttcttcatcaggggagaagaggaacctttaccgtcaacgctgatgggcttttcaccgtgtgactcgtgtaccaccggtcgcacgctcccggttgcacactctccacactctgacacccgtgtcccttgacggcttggcgtgttcggctcaaggcgtacggcgtgtcacgctaacgcccttaacactaggtaagacttaaagtgtatattatatgtagaagactttaaaaactttagggtgttcctgctgagcctgtgtcctacaccgctaggcgccaagcgctaagccttgaagcgcgaacacccatccacccccatttttctttcgtgcctttcttcttttgacacagctggggggcgatgtgatctttctcacacccatggggggtagtggagaaaacaaccaccccagcacaaacagaacaccccctcaaacgcacaaaacagggcctaggatcgaacagcagggcatcggtagagtattcctacccccaacacgttccaggctgttacaggagcaatgagaggctcacaggggctataggagatcagggggcgtgatggcacacaccaaccgcacagccagccaagctcaccggcgctggcgggcgcgactcatcacccaagcacgcaagcaaggccaaaccgaatgcccactctgcggagccaccatcacctgggacacacacgacctaccaacaagccccgaagccgaccacatcacacccgtcagcaggggaggactcaacaccctagacaacgggcaaatcatctgcagaacatgcaacagaagcaaaggcaacagaacacaaccaaacatcaaactccaacaacaaaccacaaaaacactcgtctcatggtgaaaaaaccgccaacccccaccggggacaccccctgcacaggcgtgcaa

SEQ ID NO: 49 - DNA, 29373 bp, unidentified
  source 1..29373: mol_type = unassigned DNA; note = Bacteriophage of P. acnes
cccttttgtggattagtctatttgccgactttttgtgttggtggtgagtgttgtgcagcctgagcttcctgggtctcgtgagtggtgtgatgagacacgtcgctggtggcgtgtgtggggtgaggattcgcgtgcgcagtacgtgtctgatgaggagtggctgtttttgctggatgctgctgtgattcatgatgtggtgtggcgtgagggccgggcggaccttgtggcttcgcttcgtgctcatgtgaaggcttttatgggcatgttggatcggtattcggttgatgtggcgtctggtggccgtggtgggggttctgctgtggcgatgattgaccggtataggaagcgcaagggggcctgattaggtgtctagcgttgtggggtcgcaggttcctcgtcatcgtgtggctgcggcgtattcggtgactgctggcggtgatgctggcgagcttggtagggcgtacgggttgacgcctgatccgtggcagcagcaggtgttggatgattggctggctgtcggtggcaatggcaggcttgcttctggtgtgtgtggggtgtttgtgccgcgccagaatggcaagaatgctattttggagattgtggagttgtttaaggcgactattcagggtcgtcgtattttgcatacggctcacgagttgaagtcggctcgtaaggcgtttatgcggttgcgttcgttttttgagaatgagcggcagtttcctgacttgtatcgtatggtgaagtcgattcgggcgacgaatggtcaggaggctattgtgttgcatcatccggattgtgcgacgtttgagaagaagtgtggctgtccgggttggggttcggttgagtttgtggctcgtagccgtggttctgctcgcggttttacggttgatgatttggtgtgtgatgaggctcaggagttgtcggatgagcagttggaggctttgcttcctacggtgtctgcggcgccttctggtgatcctcagcagatttttttggggactcctcctggcccgttggctgacgggtctgtggtgttgcgtttgcgtggtcaggctttgtcgggtggcaaaaggatcgcatggaccgagttttcgattcctgacgagtcggatccggaggatttggcgcggtcgtggcggaagcttgctggtgacactaatccggcgttggggcgtcgcctgaattttgggacagtctcggatgagcatgagtcgatgtctgctgccggttttgctcgggagcgtcttggctggtgggatcgtggccagtctgctacgtctgtgataccggcggataagtgggctcagtcggcggtggatgaggcgagcctggtcggcggtaaagtgtttggtgtctcgttttctcgttctggggatcgggttgctttggcgggtgccggcaagactgatgctggggttcatgttgaggttattgatgggctgtcgggaacgattgttgatggtgtgggccaactggctgattggctggcgttgcgttggggtggcacggatcggattatggttgccgggtctggcgcggtgttgttgcaaaaagcgttgacggatcgtggtgttccgggccgtggcgtggtggttgctgatactggcgtgtatgtggaggcttgtcaggcgtttcttgagggtgtgcgttcgggtgttgtgtctcatcctcgcgctgattctcgccgtgacatgttggatattgctgtgaggtcggctgtgcagaagcgtaaggggtctgcttggggttggggctcctcgtttaaggatggttctgaggttcctttggaggctgtgtcgctggcgtatcttggtgtgaagatggcgaagtctaagcggcgtgagcgtagtggtaggaagcgggtgtctgtggtatgaactcggatgagttggctcttattgagggcatgtacgatcgtatccaaaggttgtcttcgtggcattgtcgcattgagggctactatgagggttcgaatcgtgtccgtgatttgggggttgctattcctcccgagttgcagcgtgtgcagacggtggtgtcgtggcctggtatagctgtggatgctttggaggagcgtctggattggcttggctggacgaatggtgacggctacggcctggatggtgtgtatgctgcgaatcggctttcgacggcttcgtgtgatgtgcatcttgatgcgctgatttttgggttgtcgtttgtggctgttatccctaacggtgatggttcggtgtcggttcgtccgcagtcaccaaagaattgcaccggaaagttttctgccgatggttctcgtctggatgcgggtttggtggttcagtcgacttgtgatcctgaggtggttgaggcggagcttttgcttcctgatgtgattgttcaggttgagcggcggggctcgcgcgagtgggtcgaggttggccgtatcgagaatgtgcttggtgcggttccgcttgtgcctatcgtcaataggcgtcgcacttcgaggattgatggccggtcagagatcacaaggtctattcgtgcttacacggatgaagcggttcgcacgctgcttgggcagtctgtgaatcgtgatttctatgcttacccgcaaaggtgggtgactggtgtgtcggctgacgagttttcgcagcctggctgggtcctgtcgatggcttctgtgtgggctgtggataaggatgatgacggtgacacgccgaatgtggggtcgtttcctgtcaattctcctacaccgtattcggatcagatgcggctgttggcgcagttgactgcgggtgaggcggctgtcccggagcgctatttcgggtttatcacgtctaacccgccgtcgggkgaggcgcttgcggcggaggagtctcggcttgtgaagcgtgctgagcggcgtcaaacgtcgtttggtcagggctggctgtcggttggttttttggctgcgaaagcgcttgattctagtgttgatgaggccgatttttttggtgatgttggtatgcgttggcgtgatgcgtcgacgcctacccgggcggctacggctgatgctgtgacgaagcttgttggtgccggtattcttccggcggattctcggacggtgttggagatgttggggcttgatgatgtgcaggttgaggctgtgatgcgtcatcgtgccgaatcttcggatccgttggcggcgctggctggggctatatcgcgtcaaactaacgaggtttgataggcgatggcttcgggtgttgcgtcgcggatggctgctgccgggtatcagcgtgaggcggtcaggtttgccgggaagtatgcgggctattatgccgagttgggtcgtttgtggcattccgggaagatgacagatgcgcagtatgtgcgtttgtgtgtggagttggagcgtgccggccatgatggttcagcagctatggcgggcaaattcgtgtccgattttcggaagcttaacggkgtcgatcctggtttgattgtgtatgacgagtttgatgctgccgccgcgttggcgaggtcgttttcgactatgaagatgatgaatagtgacccggatagggcgaatgacacgattgatgctatggcggcgggtgttaatcgggctgtcatgaatgctggccgtgacacggttgagtggtctgcgggtgcgcagggtaggtcgtggcgtcgggtgactgatggtgatccgtgcgcgttttgtgccatgttggctacgaggtcggattatacgaccaaagaaagggcactcacttccggtcatactcggcgtcataagcgtggtggtaagcgtccgtttggttcgaagtatcatgatcattgtggttgtacggtggttgaggttgttggcccttgggaaccgaatagggctgatgccgagtatcagaggacgtatgagaaggctcgtgaatgggttgatgatcatgggttgcagcagtcgcctggcaatattttgaaggctatgcgtactgttggcggcatgcgataatttgatgtggtttccggttgtgcgccgccggttattggtgcacagggttgtctcccgcacgggggtcaacaatgttgtgttgttttccgcaaggagtgtaggttaggctatggccgatcagagtggtgaggaacagaatgttgacaatgatgttgtggagcccggaaagggtggagacattgttgatgttgtgaaggatgggcaggctgccggcgatgatcatgccggtgatgtttccgtgaagggtgaggcttctgggccgtctggcacggattggaaggctgaggcccgtaagtgggagtctcgtgctaaaagtaatttcgccgagttggagaagcttcgcgcctcggatggtgatgcgggatctgtgattgatgatcttcgccgcaagaatgaggaactcgaagaccggatcaatgggtttgttcttgagggtgtgaagcgtgatgtggctgccgagtgtggcctgtcggctgatgctgtagctttcttgtctggtggtgatcgtgaagcgctggtggagtctgctaaggctttgaagggtttgatcgaccatagtagtggtggcgtgggtgtgcgccgtcttgcggggagtgcccccgttgatgatgttaaacgacgtgagggtgtcgcgtttgtggatgctcttgtcaataattctaggagatgatttgtgatggctgacgattttctttctgcagggaagcttgagcttcctggttctatgattggtgcggttcgtgaccgtgctatcgattctggtgttttggcgaagctgtcgccggagcagccgactatttttggccctgtgaagggtgccgtgtttagtggtgttcctcgcgccaagattgttggcgagggcgaggttaagccttccgctagcgttggtgtttcggcgtttactgcgcagcctatcaaggttgtgactcagcagcgtgtctcggatgagtttatgtgggctgatgctgattaccgtttgggtgtgcttcaggatctgatttcgcctgctctgggtgcttctattggtcgcgccgtggatttgattgctttccatggtgttgatcctgctacgggtaagcctgctgcggctgtcaaggtgtcgctggataagacgaagaagacggttgatgccacggattctgccacgaccgatcttgttaaggctgtcggccttatcgctggggccggtttgcaggttcctaacggtgttgctttggatccggcgttctcgtttgccctgtctaccgaggtgtatccgaaggggtctccgcttgccggtcagcctatgtatcctgccgccgggttcgctggtttggataattggcgtggcttgagtgttggtgcttcttcgactgtttcgggtgccccggagatgtcgcctgcctctggtgtgaaggctattgttggtgatttctctcgtgttcattgggggttccagcgtaacttcccgatcgaactgatcgagtatggtgatccggatcagactgggcgcgatttgaagggccataatgaggttatggttcgtgccgaggctgttctgtatgtggctatcgagtcgcttgattcgtttgctgttgtgaaggagaaggctgccccgaagcctaatcctccggccgagaactgatttattgtagcggtgttatgtacatgtgcagggggtggtgttgatgggtataattttgaggcctgaggatattgagcctttcgccgatattcctaaagataagcttgaggcgatgatcgccgatgtggaggctgtggctgtcagtgtcgccccctgtatcgctaaaccggatttcaaatacaaggatgctgccaaggctattctgcgtcgtgctttgttgcgttggaatgatactggcgtgtcggggcaagtgcagtatgagtctgcgggtccgttcgcccagactacacggtctaatactcccacgaacttgttgtggccttctgagattgctgcgttgaagaagctatgtgacgagagtggtggcgccggtaaagcgttcactatcacacccaccattaatagtagatatgcacattctgaggtgtgttctactgtgtggggtgagggctgttcgtgcggatctgatattaacggctgcgatggccctttgtgggagatatgatatgactaattttccttacggggaaacggttgtgatgcttcaaccgactgttcgtatcgatgatcttggcgacagggttgaggattggtctaagcctgtcgaaacagtttatcgtaatgtggctatctatgcttccgtttcgcaggaggatgaggcggctggccgtgattcggattatgagcattggacactgcttttcaagcagcctgttgtgggcgctgattatcgttgcaggtggcgtattcggggtgttgtgtgggaggctgacgggtcgcctattgtgtggcatcacccaatgtctggctgggatgctggtacgcagatctatgtgaagcgtaagaagggctgatgaaatcttggcacaagatgtgaatgtgaagctgaacttgccgggtattcgtgaggtgttgaagtcttctggggtgcagtctatgttggctgagcgtggcgagcgtgtcaagcatgcggctgcggcgaatgtgggcggtaatgcttttgatagggcccaatatcgtagcggattatcatcggaggtgcaggttcaccgtgttgaggctgtggtgaggattggcaccacatataagggtggtaaaaggattgaggcgaagcatggcacgttggctaggtcgattggggctgcatcatgatcgtttacggcgatcctcgcgtgtgggctaaacgtgtgctcaaggatgatggttggctgtctgatgtgccgtgcacgggtactgtgcctgaccggtttgagggtgacttgatttggttggcgttggatggtggccccgagttgcatgttcgtgagcaggtgtttttgcgggtgaatgtgttttcggatactccggatcgtgctatgtcgttggcgcgtcgtgttgaggctgtgctggctgatggtgcggatggtgatccggtggtgttttgtaggcgttctactggtcctgatttgttggttgatggtgcacgttttgatgtgtattcgctgtttgagctggtgtgccgtcctgtcgaatccgagtaaacgtatttgttttctatattttgtttttgtttgattattttgggggttatgatggctgcaacacgtaaagcgtctaatgttcgctcggctgttactggcgacgtctatattggtgacgctcacgccggtgacactattaatggtgttggggagattcctgacggtcttaccgctttagggtatctgtctgatgacgggtttaagattaagcctgagcgtaaaacggatgatttgaaggcttggcagaatgcggatgttgttcgcactgtggctaccgagtcgtctatcgagatttctttccagctgatcgagtctaagaaggaggttatcgaactgttttggcagtcgaaggttactgccggagccgattcgggttcattcgatatttctcctggtgccacgacgggtgttcatgccctgttgatggatattgttgatggggatcaggttattcgctactatttccctgaggcggagcttgttgatcgtgacgagatcaagggcaagaatggcgaggtgtacgggtatggtgtgacgttgaaggcgtatcctgcccagattaaccataagggtgatgcggtgtctggtcgggggtggatgacggctttaaaagctgatactcctccggttccgccgaagcctccgaagcctgagccggatcctaatccgccgtccgataactgatacacgagtttaagggattgttgatagatgagtgacactggtttcacgttgaagattggtgaccgtagttgggtgttggctgatgcggaggagacggcgcaggctgttccggcccgtgtttttcgccgtgccgctaagattgcccagtcgggggagtcggctgatttcgcccaggttgaggtgatgttttctatgttggaggctgccgccccagcggatgctgtggaggctttggaggggcttcctatggttcgtgttgccgagattttccgtcagtggatggaatacaagcctgacggtaaaggtgcctctttgggggaatagtttggctccacggcctgattgatgattatcgtggggccatcgaatatgattggaggacacggttcggttgctcggtttatgatgttggtggccccgtaatgtgttacggtgaggctgtccggctggctggcgtgttgtgtacggacacgtctagccagttggcggcccaccttaatggttggcagcgcccgttcgagtggtgcgagtgggctgtgttggacatgttggatcattacaggtctgctaatagtgaggggcagccggagcctgtggcgaggccgactgatgagcgtcgggccaggtttacgtcgtctcaggtggacgatattttggcgcgtgttcgtgccggtggcggggtgtctcgcgagattaatattatggggtgaatagtgtatgtctggtgagattgcttccgcatatgtgtctttgtatacgaagatgcctggtttgaaatcggatgttggtaaacaattgtccggggttatgcctgctgagggtcagcgttcgggtagtctttttgctaagggtatgaagttggctcttggtggcgcggcgatgatgggcgctattagtgtcgctaagaagggcctcaagtctatctatgatgtgactattggtggcggtatagctcgcgctatggctatcgatgaggctcaggctaagttgactggtttgggtcacacgtcttctgacacgtcttcgattatgaattcggctattgaggctgtgactggtacgtcgtatgcgttgggggatgcggcgtctacggctgccgcgttgtcggcttctggtgtgaagtctggcggtcagatgactgatgtgttgaagactgtcgcggatgtgtcttatatttcgggtaagtcgtttcaggatacgggcgctatttttacgtctgttatggctcgcggtaagttgcagggcgatgacatgttgcagcttactatggctggcgttccggtgttgtctctgttggctcggcagacgggtaaaacttcggctgaggtgtcgcagatggtgtcgaaggggcagattgattttgccacgtttgcggctgcgatgaagcttggcatgggtggtgctgcgcaggcgtctggcaagacgtttgagggcgctatgaagaatgttaagggcgctttgggctatcttggtgctacggctatggccccgtttcttaacggtttgcggcagatttttgttgcgttgaatccggttatcaagtcggtgacggattctgtgaagcctttgtttgcttctgttgatcagggtattcagcgggtgatgccgtctattttggcgtggattaatcgtatgcctgctatgattacgagaatgaatgcacagatgcgcgccaaggttgagcagttgaagggcatttttgcgagaatgcatttgcctgtccccaaggtgaatttgggtgccatgtttgctggcggcaccgcggtgtttggtattgttgccgcgggtgttgggaagcttgtggcagggtttgccccgttggcggttgcgttgaagaatttgttaccatcgttcggtgctttaaggggtgccgctggcggtcttggcggcgtgtttcgtgccctgggtggccctgtcgggattgtgatcggcttgtttgctgccatgtttgctacgaacgcccagttccgtgcagctgttatgcagctggttggtgtggttggtcaggctttggggcagattatggccgctattcagccgctgtttggtttggttgctgggctggtggcccggttggcgccagtgtttgcccagattattggcatggttgccgggcttgcggcacagcttatgcctgtgattagtatgcttgttgccaggctggttcctgtgatcacgcagattattggtgcggtgacacaggttgctgcaatgttgttgccggcgttgatgccggtgttgcaggctgttgtggctgtgattcggcaggttgttggcgtgattatgcagcttgtgcctgttttgatgcctgtgattcaacagatcttgggtgctgttatgtctgttctgccgccgattattggtttgatacggtcgctgataccagtcatcatgtcgattatgcgtgtggtgatgcaggttgttggtgtcgtgctacaagttgttgcccgtattattccggttgtggcgccgattgtgacagctgtgatcgggtttgttgcacgtattcttggtgctattgtgtcggctgccgccaggattattggggctgttgcccgtgttattgggtgggttgtgagccatctggtgtctggtgtggcgcgtatgggttcggctatccaggctggctggaatcatattagggcgtttacgtctgcgtttattaacggtttcaagtcgatcatttcgggtggtgtgaacgcggttgtggggttttttgcccggctgggttcgtcggttgccagccatgtgaggtctgggtttaatgctgccaggggtgctgtttcttccgccatgaacgggatacgtagtgtggtgtcttcggtggcgtctgctgttggcgggtttttcgggtcgatggcgtctagggttcggaatggcgctgtgcgcgggtttaatggggctaggagtgcggcctcttctgctatgcacgctatgggctcggctgtgtctagcggtgtgcataatgtgttgaattttttccgtaatttgcctggtaatattaggcgtgcgcttggtaatatggggtctttgttggtgtctgctggccgtgatgtggtgtctggtttgggtaatggtatccggaatgctttgagtggcttgttggatacggtgcgtaatatgggttctcaggttgctaatgcggcgaagtcggtgttgggtattcattcgccgtcgagggtgtttcgtgacgaggttggtcggcaggttgttgctggtttggctgagggtattactggtaatgctggtttggcgttggatgctatgtctggtgtggctggccggcttccggatgctgtggatgccaggtttggtgtgcgatcgtctgtgggctcgtttacaccgtatggcaggtatcagcgtatgaacgagaagagtgttgtggtgaatgttaacggcccgacgtatggggatcctaacgagtttgcgaagcggattgagcggcagcagcgtgacgcgttgaacgcgttggcttacgtgtgattgggggtgtggatcatgtttattcctgacccgtctgatcgtgccggtttgactgttacctggtctatgttgccgttgattggtaatgatccggagcgtgtgcttcatttgacggattacacgggtgcgtctcctgtcatgttgttgaatgattcgttgcgcggtttgggtgttcctgaggtggagcatttttctcaaactcatgttggggtgcacggctcggagtggcgcgggtttaatgtgaagcctcgcgaggtgacgctgccggtgctggtgtcgggtgttgacccggatccggatggtgggtttcgtgacggttttttgaaggcgtatgacgagttgtggtctgcttttcctcctggcgaggtgggggagttgtctgtgaagactcctgccggtgttgagcgtgtgctaaggtgtcggtttgattcggtggatgacacgtttactgttgatccggttaatcgtggctatgcgcgttatgtgcttcatttgacagcctatgacccgttttggtatggggatgagcaaaagtttcgtttcagtaatgcgaagttgcaggattggttgggtggcggccctgttaataagaagggtaccgcttttccggtggtgttgacgcctggtgttggttcgggttgggataacctgtcgaataagggtgatgtgcctgcgtggcctgtgattcgtgttgagggcccgttggattcgtggtctgtgcagattgatggtttgcgtgtgtcatcagactatcctgtcgaggagtttgattggattactattgacacggatcctcggaagcagtctgcattgttgaacgggtttgaggatgtgatggatcgtttaaaggagtgggagtttgcgccgattcctcctggcggttctcggagtgtgaatattgagatggttggtttgggtgccattgttgtgtcagtgcagtacaggtttttgagggcttggtgaatagtttatggctggtcttgtcccgcagataacattgtttacgccagactatcatcgtgtagcgcctatcaatttttttgagtcgctgaagttgtcgttgaagtggaatggtttgtcgacgctggagttggtggtgtctggtgatcattccaggcttgacgggttgactaagccgggtgcacgcctggttgttgattatggtggtggccagattttttctgggcctgtgcgtaaagtgcacggggttgggccttggcggtcttcgcgggtgactatcacgtgtgaggatgatattcgcctgttgtggcgtatgttgatgtggccggtgaattatcgtcccggtttggttggttcggagtggcgtgcggaccgtgattatgcccactattctggtgcggcggagtcgattgctaagcaggtgttgggggataatgcttggcggtttccacccggtttgtttatgaccgatgatgagcgtcgcggccgctatattaaggattttcaggtgcggtttcacgtgtttgccgataaactgttgccggtgttgtcgtgggctcgtatgactgtttcggtgaaccagtttgaggatgcgaagtttgatcagcgtggtttagtgtttgattgtgtgcctgcggtgacgcgtagtcacgtgttgactgccgagtctggttcgattgtgtcgtgggagtatgtgcgtgacgcccctaaggcgacgtctgtggttgtgggtggccgcggcgagggcagggatcggctgttttgtgaggatgttgattcggctgccgaggaggattggtgggatcgtgtcgaggtgtttaaggatgctcgtaacactgattcggagaaggtgtctctcttcgatgaggctgagcaggtgttgtccgagttgggggccacgtcggggtttaagatcgagttggctgagtcggatgtgttgcgtttcgggcctggcagcctgatgcctggggatttgatttatgtggatgtgggctcggggcctattgcggagattgttcggcagattgatgtggagtgcgattcgcctggtgacgggtggacgaaagtaacaccgattgcgggggattatgaggataatccttcagcgttgctagctcgccgtgtggctggtttggctgctggtgtgcgggatttgcaaaaattctagttgattggggtttgttgtgggtattgtgtgtaaagggtttgatggtgtgttaaccgagtatgattgggctcaaatgtctggtctgatgggtaatatgccgtcggtgaaggggcctgacgattttcgtgtcggcacgacgattcagggtaatacggtgttgtgtgaggtcctaccggggcaggcttgggctcacggggtgatgtgcacgtcgaatagtgttgagacggtgacaggccagttgccgggccctggggagacccgctacgactatgttgtcctgtcgcgggattgggagcagaacacagcgaagttggagattgttcctgggggtcgtgcggagcgtgcccgtgacgtgttgagggccgagcctggcgtgtaccatcagcagttgttggcgactttggtggtgtcgtctaacgggttgcagcagcagttggataggcgtgctatagcggctagggtggcgtttggcgagtctgctgcgtgtgaccctaccccgatggagggtgacagggtgatggttccttctggggcggtgtgggctaatcatgccggcgagtggatgctattgtcccccaggatcgagacgggcactaagcagattcagttttgcgggtctgctgtgtatgcttacacgatcccgtttgaccgccagttcactagtccgccgattgtggtggcgtctatgggaaccgctgctgggggcactgcccagattgatgtgaaagcctacaatattacggtcaagggtttcagtttagcgtttatcacgaatgatggttcgaagccgaatggtgtgcccgcgatagctaactggatagctgtcggcgtgtgaccgtgtcgaggctgtggcggatggtgtgatgttggggggctgtggtgtcgtggtttactcctgcactggtggcctctatttgtaccgcgttggccacgattttgggttctgttcaggcggtcacgtttaaatcgaggaagcgtttgcgtcggctgtcggctcaggtggatgctttggaagagtatgtgtggggtgtgcggcgtaaggttcgccggtttaacgccgggcttcctggcgaggtggagcctatgcatcttcctgatgtgcccgagtttttgaaggatactgttgatggtgggggtgagtagggttgagggagttggaggaagaaaaaaggcagcgccgcaattttgagaaggcttccctaatactgttgttcctgtcgcttgtgctgttgatggtggttgctgcgggtgctttgcgtttcggatcgctgtcttctgagcgggattcggagcaggcgagggcccagtctaatggtaccgctgccaggggtttagccagccgtgtgcggcaggtgtgtgcgcatggtggccaagagtcggtgaagctgcacaggtctggtttgtgtgtggatgctgtgcgcacggagcggagtgtgcagggtgtgcctggcccgaccggtgtacggggcccgcaaggccctgccggtgttgatggccgggatggtgttaatggtttgcctgggctggttggccctgttggtccgcagggttccccgggtttgaatggcgtgaaggggcctgacgggctgcctgggactaatgggtcggatggccatgatggtgtttcgggcagtgcaggtgccgctggtgtaaacggcgctgatggtaaagatggcgcgaatggcaccgatggtgagcgcggtgatgtgggtccttcaggccctgccggcccgcaaggtgcacagggtgaacggggtgagcgcggtgccgctggtgtaaacggcgctgatggtaaagatggcgcgaatggccgttctgtggtgtctgtgtactgttccgggggccgcctgatggtgaaatatagtgacggtgtggcttctaccatatcgggctcggtggcctgccagggtgtggatccgtctcctatagtgaccatatcatcccacaaataatatgaagagggaagggtgttactagtgttggttgtgtttggtggtggtgtgtggtgagatacattcctgcggcgcatcattcggccggctcaaatagtccggtgaatagggttgtgattcatgcgacgtgtccggatgtggggtttccgtctgcctcgcgtaaagggcgggcggtgtctacggcaaattattttgcttccccatcatctgggggttctgcgcattatgtgtgtgatgtgggggagacggtgcagtgcttgtctgagtctacgattggttggcatgccccgccgaatccgcatagtttgggtatagagatttgcgcggatgggggttcgcatgcctcgtttagggtgcccggtcatgcttacacgagggagcagtggctggatcctcgggtgtggcctgcggtggagaaggctgctgtcctgtgccggcagttgtgtgacaaatataatgttccgaaaaggaagcttagtgcagccgatttgaaggctggtaggcggggtgtgtgcggccacactgatgtgacggatgcgtggcatcagtcggatcatgacgatccggggccgtggtttccgtgggacaaatttatggccgtagtctgcggcggtagtggtagtgaggagttaactgtggctgatgtgaaagccttgcatgatcagattaaacaattgtctgctcagcttactggttcggtgaataagctgcaccacgatgttggtgtggttcaggtgcagaatggtgatttgggtaagcgtgttgacgctttgtcgtgggtgaagaatcctgtgacggggaagctgtggcgtactaaggatgctttgtggagtgtctggtattacgtgctggagtgtcgcagccgtcttgccaggcttgaggcggatgtggcccggttgaagaagtgatgtgtgatgggtaaacagttttggttgggcttgtttgagcgtgccctgaaaacttttattcaaacgtttgttgctgtgttgggggttactgcgggtgtcacttatactgcggagtcgtttcgtggtttgccgtgggagtctgccctgattacggccggggtggctgctgtcctgtcggttgctacctcgtttggtaatccgtcgtttgtggccggtaaacctaaaacggcgcctgttgtggatgctgggcttgttccacccgatgatgggggcttggttgagcctcactcggtggatgtgtcggatcctggcatgatcgagccgttggatgatgagagtgtagactatgtgccgaggcgtgccgccgagtctgaggttggcacggtagagtctactgttgcataattgaatatgtgtgtgtgccccagcggtgctgccacgatcgtgtggtggttaccgctggggcactatttctgtatatacggtgtggctatgattcgttgttgttgatggtttcctcaatcgtctgatacaggtggaggcaggtagagatagtttcgttggcctggtctagaatgttctggccgataacatttttatggttgtcgcggtgacaggtgatagaccacaggatctcgtcggccgtcgcttgcaatagtttgacctggtatgcgattccggcgagccagtctagtgcttccgggcttgcctgtgtgtcgtctagcatgccactattgttgctgttgtttgtggggtatcctgcactgtcgcagcaccataggatttcgctgcactcgtctagcgtgtcctgatcgatagcaagatcgtcgaggctgacttctttaacggtaaggttcacgtcatcgagtgagatgggtacacggtacttgttttccaactgttgcatgttggtgggctgttgttggatgattcggtgtactactgttttgagggccgtgtaggggatattgtgtgtggtgttcatggttttatctcatccctgtgatgtcgtcactatcgtctggatagtatctactgtttgcgtagcctgttagggtgatgagtgtttggtcggcccactgtttcacagtctgccgggtgactccgagtcgttgggctgccaccgaataggtttggtcatacccgtatacttcacggaatgctgccaaccgtgccaaatgttttcgctgtttggatggctggcaggagagggtgtagtcgtcgatggctagctgcaggtcgatcatggagacgatgttgttgccgtggtgttgtggcgcggttggtgggggtggcatgcccggctccmcgcgcggtttccatgggccgccgttccagatccattgggcggcttggatgatgtcggcggtggtgtaggttcggttcattggtcatcccctgaataggttgtcgaggttgtctgggttgctggtgtcgaatcgtcccacacagtggcagtagtcgtacatgagtttgataatgtgttggtggtcgccgaggtaggtgtttccgctgatactgtaggtggctgtgccgtctttgctgatgctgtatttggcggtgatggtttcgggtgtttcggtgttggtgatgatggctgtggtggtggtgcctacggtttgtagcactgtggtttgggttccgtcgtcgagggtggttgtgaccattgtggttttccttaaatgcttgtctggttgtcggctatagtggtgatttctggtactggtttgggtagatctaggtgttgtgtagccttgttggctaaacgttgggctacacggtagcacatttggatccacgggttgtcttgtagctggtggtattggttgcgtacggctatgtagaggagtgcgtcttgatagaggtcgtctgggttgatggccggatagcggcgtgcagtgttgctacaagctttgtgtagctggtgttgatggttgggggttgcccattcccagttggctgtggtggcttgctgtactttggttggccgtctgctcatggcactatttcatctcgctatctgatagttgtttggtgttttgttgtttatagtgtagcacactagtccggggtggccggtggtgcctgtgcggtgccgaaaccatgtggattcgccttccatggatgggcattggatgaaggtgcgttgtccttgctcggagatttctagatggtgccggtgcccggccatgagaatactagatacggtgccgttgtggaattcttggccgcgccaccattcgtactgtttgccggtgcgccattggtggccgtgggcgtgcaagatttgtgtgcctgccacatcgacggtggtggtcatttcgtctcggctggggaagtggaagtgaaggttggggtattggttgttgagctggtaggcttctgcgatggcccggcagcagtccacgtcgaaggaatcatcgtaggtggtgacgcctttaccgaagcgcactgcttcgccgtggttgccggggatggatgtgatggtgacgttggcgcagtggtcgaacaggtggacgagttgcatcatggccatgcgggtgagcctgatttgttccgttaagggtgtttgtgtgcgccacgcgttagagccgccttgtgacacgtatccttcgatcatgtcgccgaggaatgcgatgtggacccgttcgggtttgcctgcctgttgccagtagtgttttgcgactatgagggagtgtaggtagtcgtctgcgaatcggctggtttctcctccggggatgcctttgcctatttggaagtcgcctgccccgatgacgaaagcagtgttgttgctgcttgtgttggtttctggtttgggcggctgccagtcggctaatttgttgacgagttcgtcgatcgggtatgggtctgttgcgggttggtggtcgattattttttgtacggatcggcctgtttctccgttggggagtgtccattcggagatgcgtgtgcggcgtacggtgccgtttgtgagatcatcgtcgatggtgtcgatggcgttgttgtggttggctagctgtgtgaggagccggtcaatattgtctatcactggttttcctcctcctgtttctgggtgtttgtgagttggcggcgatagtctttaataacagtggcggagattgggtatccggcttgggtgagctgttttgctagccatgaggcgggaatggttttgtctgcgagcacgtctgcagccttgttgccgtagcgttgaataagggttttagttttggttgccatgatatcctaggggttgtgtggcgggctgccatcctgtgcggcagtcgccgtcgtgtcctggtttacgggtgcaccatgtgatggtgccgtctgtgtggttgagtgtttttccgcacatgacgttttgtagatgctccggcagctggtcggtgttgttgctggtttgtgtgtcgaagagtgttttctggttggtgaaatgctctgacacggtgccattatgtacgggtagtatccatgttttccattgttgttgtagccgggtgttccagtggaattgtttggcggcgttttctgcctgttttaaggttttgtagtagccgactagtatgcgctggtgttcactgtcgggcgggttttggcctcgccagtattgtgccgcgatggcgtaccggttgctggatgtaaaggtgttccagcagtattcaataatgtgttgcaacatactgtctggcaggctgtcggggttgatggtggtgttttgggcaatgatgccgcggatggcttgccggtttttggtggtgggtttgaacgagatgctcacgatagtgccggctggtcgtcttgcatgaactggttgaaggtgttgttaccggcgtgttgggcttgtgtgatgtcctggtcggtccagtcggggtgttgctgtttcagatagtaccagtggcacgcatcgtaggtttcgtcttgtagccgtgtgagatggttttcggtgatgatttgtttccacattgtccatgacacgttgagccgtttgagcatgtctatggctggcacgttgaaggagttgaggaacaggatttcgtgggtgtagtattccttctcgtattggtcccatccacttcggtgcctgttgggctggtttttggggtaggcttcccggcatactttgtgcaaacgcttggccatgtcgtcgggtagtttaatgtcggggttggcgcggatcatggatctcatcccgtcataggtggtgccccaggtgtgcatgatgtaggtggggtcttctccgtcggcccatttttctgcacagatggcgaggcggatgcgcctcctggatgcttggctggtgttgcgccggccggggatggggcacgtgtcgaggggatccatgatgttttagtgtacctttcttgaggtgatgtttgtttactttgtgtggttttattgtagcacagtgtctagtgcttgtgtcaaccctgtttttccggcctgcaggtaggtgtctgtgacatccccgacagtgaggggcacgtgtacggcttgggggagtgccgtctggagggtttgggccatcttgtctcctgctttgtctgggtcggaccagatgtagatgtggtcgtagccttcaaaaaatttggtccaaaagttttgccacgaggttgcgccggggatggctacggccgaccatccgcattgttcgaggatcatggagtcgaattcgccttcgcaaatgtgcatttcggctgccgggttggccatggcggccatgttgtagatggagcctgtgtcccctgccggtgtcaaatatttggggtggttgtgggttttgcagtcgtgcgggagtgagcagcggaaacgcatttttcgtatttcggctgggccgccccagacggggtacatgtatgggatggtgatgcactggttgtagtcttcgtggcctggtatggggtcattgtcgatgtatccaaggtggtggtagcgggctgtttcttcgctgacgcctcttgccgagagaaggtcgagtatgttttcgaggtgggtttcgtagagggccgaggctttctggattcggcggcgttccgcaatgttgtatgggcgtatgctgtcgtacattcgggttttcttcttctaatcgttgttgtagtttggcgaggcctcctccgacaccgcatgtgtggcagtaccagacgcccttgtcgaggttgatgctcatggagggctggtggtcgtcgtggaacgggcagaggatgtgttgctcgttcctggacggattgtaccgtatgtggtaggtgtcgaggaggcggcgggtgtcagaggtgtgggaggagctcgttgagggttgataccacataggcttcgctccatggcttgttgcgctgtttcatcactacgagtccgatggtggactggttttcgcggtttcggtgtgtttcgtagttgcgtgcctcccggctggcttgtttcacgaattcggcgaggtggggttgtcccgctttcgcctcgatcacataggttttatggccggttgtgaggatgaggtcgccttcatcctctttaccgttgaggtggaggcgttctatatcatggccggtgtcgcgtagctggtggaggagtcgtgtttcccattcggctccggcccgccggtttcttgattgttgtgtcgacatgatagtcctttgtgtgttgtggtcatgttccatggctgtttttcggtgaggggcccgaagaatgtgtattcggggtaggctcgtaaccgttcgtatcgggtgccgtcggggctggatttgcctgtgcgctgtttcaacactgcgatgcgcgcctcggccggtatcgtgagcccgttgccattatcctcaccaccatacaatgatactccgaggatgagttgtggtttttctgagaggccgtttttgatttctcgccgtgctggcgggtgttcgatgtcggagccggttttgtctgttgcgtggtgggtgacgatgatggtggagccagtatccctgcccaatgctgtgatccattgcatggcttcttgctgtgcctggtagtcactctcgcagtcttggatgtccatcaggttgtcgataacgatgatgggtgggaaggtgttccacatttccatgtaggcttgcaactccatggtgatgtctgtccatgtgatgggtgactggaaggagaatgtgatgtgttcgccgtggtggatgctgtctcgatagtattctggcccgtagtcgtcgatgttgtgttgtatctgggcggtggtgtgttgggtgttgagtgagatgattcgtgtggaggcctcccagggtgtcatgtcccctgatatgtagagggcgggctggttgagcatggctgtgatgaacattgctagcccggatttttggctgccggaccgccccgcaatcataacgagatcccctttgtggatgtgcatgtccaggttgcggtagaggggttctagctggggtatgcggggcagttcggcagcggtttgggaggctctctcgaaggatcgttgtagagagagcatcggaaccttatctatctatcggttggatgtgtattggtggtcagatggagtcgatatcgatgtcagtagaggctgtggtgtcgtctagctggccgttatcgcgcttgtctacgtattcggcaactttatcatagatggcgtcgtctaatggtttgagcacgaccgcgttgaacccgtttttggtgcgtacggtggcgagtttgaaggcctgctcctcgccaaggtatgcttctagatcgcggatcatggagtgtgggcgatcattgttgcctcgcactttttcgatgatggcgttggggatggtttctggggtgccgttgttgagatcgtctagtgtgtggaagatggtgacatcagcgtagatgcgatcggctgtctgtccaccgtagccttcggtgttgtgttctacgtcgtgcactttgaaggcgatggcggtggcgtcctggtttcgggaggggttgaagaaggtgctgttgctgttgttgcggtagtttgcgagtcccattgttgtttccttttactgttttgttggtttgtgtcggtttttatcgggtgaggctgtttcgtttgctgcggaaagcctcggaaacgtcactgttactggtgatgatcttcttgtactgtttcagaaggtcggctagctgtgccttgcttgttgcattgttgattttgtcgatgacgatactgttttctttggatgcgatgttgtccacgtagtctttggcggcctggttgtatcggtcttggaggatgatggatgcgctcgctactagtgttgcgagatcccagtctttggacacgtcatcgtttttgagtccgcctagcaggtcgatgatggcctgttttgtctgctctgctgtgtctcctcggatgaccgcccatggtgcagcatagtctccaccatatttgagtgtgatcgtgagtcgatcattgtcgatcttgtctttatcggtcatttggtgtccttttctttattgtctgtttctggtggctgtacggtggattctaccgggtatctgtacgagtttttgccgttgacggcccagcatgcgtccttgacggggcagcctttacagagtgttgtgacgtgtgggacgaagatgccttcgctgattcctttcattgcttgactgtacatggatgatacatgccggtaggtgttgttgtcaaggtcgtagagttcggtggatgtgccttgtgtcggggacttgtcgtcgttgcggctggtggctggcgtccaaaacatgccttttgtcacatcgttgccgtgttggttgagcatgtaccggtaggtgtgcagctgcatgctgtcggcgggtaggcgtccggttttgaggtcgaggatgaaggtttcaccggtgtcggtgtcggtgaaaacgcggtcgatgtagccgacaatagtggttccgtcatcgaggatggtttctacagggtattcgatgcctggctggccgtcaataacagcggtagcgtattctgggtggttgcgcctccatgttttccaccggtcaacaaaggtttgaccgtaaaccatccaccagtcgtagtctttcttgtgtggcccgcccgactcgcacaggtttttgcacactctgccggagggtttgatttctgtgccttcggattcggcgagggcgacttgggtgtcgaaaatgtttttaaaggatgcgagtttgtctggcagtgcagggtattcggcggggttgtacaggtggaggtcgtattgttcggtgatgtggtgtatggcgcttccggcgatggtggcgtaccaggtgtggtgttgggcgtggtagccgtgggataggcgccatttttctccacactcggcccactgggtgagtgaactgtaggagatgtggcctggatggtggatggttttcgggtattgtgctagaggcattacttgtcgcctttgtgggtgttccaggggtttcgggtgtcttggccggcatcgtgttgctggtatgcgaggagtgcgaggcagtgccaggcagcatgggctagatgcggtagcccggattcgcggtcgaggttgttgccttgctgccatgatagcacatggcggtagagggcgtcaacgctgtggctccacgggtatcctccggtccagttgttgtcgccgtatttggtggcaccgtatccggcaacctcgcctagggcgtgcaaggctgtagggtcgatgagggagagcctgcaaagtttcaattcttttcgggcaccggtgttggggtcggtgtacatgcgggtgggctcatccatggtgcgtgtgctccttaagcgtgggttactggttgttgtcgtgggctagggcgacggcgagaataatgatggcgagggtttcagctatcaggatgggtgttgtgatcatttgtggtttttgggatggtaggtgagggttgatgcacctaggagggtggcgagggcgcatgcggcgatgatggcgagggctgccttgtgtggggtgccggttgcgtacatccatgtgatgatggcgccttggatccaggcgagactggtgaagaacgtttcgtaactgtgtagctcaatgttgttgttgggtgtgttcatgcttgctcctgaagaatggtgttgatggttttataaatgttgtacaggtcggtttcgatagataacagttggttgatttggtggtcgagatcaatgtctgggttgagttggttgatgcgggatgcaatatcggtggctgtgcgtagtgtgccgccggtgtggtgaataatgtgcgccgtgtcggcgagtccggtggtgacagcgtagtgggagaggagaggcatagcggggatgctccttggcgggttactgttgcgggttgatgttgaggtcggtgacgtgcgggtggtcttctgttccggtgacgaggcagtggacggtgacgggtagtttggatgctcccggctgtttcattgttgcgccgtagacgatgctgaaggtgtctttgccaataattttgtggagttggaggtcgatgtcggggttgccgttccatttaacgccttgtgctgctgctttctgttcggctttccggtcgcaggtgtgggctgcggtgatcatggtgagtccggtggaggtttcttcaccccttgcctgggcttgcttgtgggttttagtctgttcggcttgtagggagcggactgcggcggcctggcgggccttcttctcggctttgcgctgttggacggttttgggtgtccattcggtgttggctgtggtggcctgtggggctggctgtgaggcgagtggcggattatcgtcgggtgctgggaggaaagagcatgcggcgatgatggcggctgtgattccggcgatggtgtagccgtttttcttgttcatgactgttgtcccctttccggggtgttgttcgttgctgacatgatcaatacttccagtgactggacctcatgtcaaggctgcgctcaactattgtgagcgtttcttgtgtggcttggggttttatcgggcgcatagggtgagtaggtggccaacattgatgcgtgtcacgttccagtagagttgtgtggcttcaccgccggtgagcggcttccactcatcatggctgaacacggtgccgtcggtggctatgaatgtgttggggcgtagcttgtggagttcagtctctacgctctgccggtaggcttcggcgaggccctcaaaatccatgtggtcgcaggagaggttttcgaggcgtgtcaggtcgaagggtgtggggcagtcgtagctggcgggggtgtagagctgggtgaagtgatcggcgatcttttgcatcatgattccttttctagtgtggtgggttgatagttttatcgggtggatgcgacaaggatggcgtctacgtcgatcatgtcgatgagatcgtgaagttcctcggcctcattctcggtgagtggctgccagtctcgtggcccgtatatggctccgtcgagggtgacagtccacaggggccggatgagccggatggcttcttcgactttggcacggtataggcggcagatgatagacgtgtgggtgttgcctatgtcacatcctgccaggtgtgcggggtggagtgggttgatttctgtctgcccgtagaggctggtgaatgatggtgtgatgagtgtgccatccatgggagtgctcctttcggtggtgtaggggttgttgtggtttctagagtgtgcgggctgcgaccctacagtcaaggctgcgctcattcggattgagtgtttcatgctggagtgtcgggcgtgaccagatgtcactgaagcctttatggcctctctcagcgtctcaaatcttctaggggtaggattatgcagggttgaccctgctgatcgattctaggggcctttacgtgcgtctcaggggtatgtctgggtgatagcaggtgtggcagatggcccggaaggtcgagataggtctgcatcgcaacgtttggggtgtcatatctgaatattggatctacaccctcatgctgtgtgagataggtcacactcgcctagcgtggtgtgcactctcgaggccactctgccgatctaacgtagagggtgtagcccagaaatgccatttaaagccttcacatggcgcctaggagcgccttatagggtgggggctaggtatttatacccccagcatattctgatcgattctagacgcttccaggagcctgatgcacgatcaaccatctcggcatagatcatcagcccctatcccgcttagctaagcctcaactatgtggacagtgttggatgctgtgggggaagaaggacacagtagaagaaagaagggggagcatcagtcttaacacctgaggtacttaagttaaccttaggatcttagcactgatgggcttaacgcttagcaccgagcccttgaggggctcggcatcagcccgagcaggcacagtcctgaaaggggtacacgccatcagggaaggcttgagagtacgaggagcctcagcgacgagtactcgaaagcctgagggaacacccttagcactgacaggcctagcgtgttcggaaaggacacaggggtacagtgtgacagctgtccgggagtgaaacccgttctggctaggggtttcagccttaaccacctgtaaaggttacaagactctaagaaaatttaaggaaacttttaggttttatttttggacctttaccaccaaaaacacccgtttacacccctcaaacccgcctatagagccaaacaccggtgttgagggtatctctacctagtgtgataggctggacaggtagccagctggacgcaaggccgaaatccgctgacgcggctttcaccctcacatccatcagtctaccaaacactttaaagcttcaaggctaagcgctaagcccttaagaccttaacgcttagcaccgagcccctcaagggctcggcatcagtcctaagagctaagcccttaaggatctaagttattataaaagctttaaagtcttaaagtaaatatataaccttaacagttaaacgtttaaagctttaaaccttaacacctaagttaattataaaaccttaaaggcttagcacttaaggatataaacttaacatcagtgtttaagacttaaagacttataagctttaaacacttaaagtaactctaagactttaaaaaccttaagtacttaaagttaaccatcagtcttaaactttaatattataacctataagtcttaaagcttataaattataaaagttttagaagagctaagagattaacttctttacttctcttctctctttggttctttctctcttctcttcttttcttcatcaggggagaagaggaaccttttaccgtcaacgccgatgggctttcaccgtgtgactcgtgtgcttctggtcgcaagctcccatcgcacactccccacacggtgacacctgtgtccctttcaagcttagcgtgttcggctgaaggtgtacggcgtgtcacgctaacacccttaacaccaggtaagacttaaagtgtatattatatgtagaagactttaaaacctataaggtgttcctgcttagcctgtgtccttcaacgctaggcgccaaacgctaagccttgaaacgcgaacacacacccacccccatttttctttcgtgtccttcttcttttgacacagccgggggggtagtggagaaaacaaacaccccaccacgttcaagacaccccctcaaacgcacaaaacagcccctagaatcgaacggcagggcaagggcaaggtattcatacccccagacgattccaggccgttacaggggccataggtgaataggggacgtaatggcacacaccaaccgcaccgcatctgcctcacaccggcgctggcggcaacgactcatcacccaagcccggcagcaaggccaaaccgaatgcccactctgcggagtcatcatcacctggaacacacacgacctgccaacaagccccgaagccgaccacatcacacccgttagcaggggaggactcaacaccctcgacaacgggcaaatcatctgcagaacatgcaacagaagcaaaggcaacagaacacaaccaaacattcaattccaacaacaaaccacaaaaacattgattccatggtgacaaacccgccaacccccaccggggacaccccctgcacacc

SEQ ID NO: 50 - DNA, 29424 bp, unidentified
  source 1..29424: mol_type = unassigned DNA; note = Bacteriophage of P. acnes
gcttagtgaaatacctcccttttgtggattagtctatttgtcgacattttgtgttggtggtgagtgtggtgcagcctgagcttcctgatagtcgtgattggtgtggggagacgcgtcgttggtggcgtgtgtggggtgaggatagtcgcgcgcagtacgtgtctgatgaggagtggctgtttctcatggatgctgcggtgattcatgatgtggtgtggcgtgggggtcgtgctgatttggtggcttcgcttcgtgctcatgtgaaggcgtttatgggcatgttggataggtattcggttgatgtggcgtctggtggtcgcggtaatggttctgctgtggcgatgattgacaggtacaggaagcgtaaaggggcctaatgtctagcgttgttggttctcaggttccgcgtcatcgtgttgctgcggcgtattcggtgactgctggcggggatgctggggagcttgggcgtgcgtatgggttgacgcctgatccgtggcagcagcaggtgttggatgattggcttgcggtcggcggtaatggtcgtcttgcttctggtgtgtgtggggtgtttgttccgcggcagaatggcaagaatgcgatccttgaggttgtggagttgtttaaggcgactattcagggtcgccgtattttgcatacggctcacgagttgaagtcggctcgtaaggcgtttatgcggttgcgttcgttttttgagaatgagcggcagtttcctgacttgtatcgtatggtgaagtcgatcagggcgacgaatggccaggaggctattgtgttgcatcatccggattgtgccacgtttgagcgtaagtgtggttgtccgggttggggttctgtcgagtttgtggctcgtagccggggttcggctcgcgggtttactgttgatgatttggtgtgtgatgaggctcaggagttgtcggatgagcagttggaggctttgcttcctacagtaagcgctgctccgtcgggtgatccgcagcagatttttttgggtactccgccggggccgttggcggacgggtctgtggtgttgcgtcttcgtgggcaggctttgtcgggtggtaaaaggtttgcgtggacggagttttcgattccggatgagtctgatccggatgatgtgtcgcggcagtggcggaagttggcgggggagactaatccggcgttgggtcgccgcctgaattttgggacagtatcggatgagcatgagtctatgtctgcggccggttttgcgcgggagcggcttggctggtgggatcgtggccagtctgctacgtctgtgattccggccgataagtgggctcagtctgctgtggatgaggcgagtctggtgggcgggaaagtgtttggtgtttcgttttctcgttctggggatcgggttgctttagcgggtgccggccggactgatgctggggttcatgttgaggttattgatggactgtcgggaacgattgttgatggtgtgggccggttggctgactggttggcggttcgttggggtgacactgaccggatcatggttgccgggtctggtgcggtgttgttgcagaaagcgttgacggatcgtggtattccgggccgtggcgtggtggttgcggatactggcacctatgtggagtcttgtcaggcgtttttggagggtgtcaggtctggtgttgtgtctcaccctagggctgattctcgccgtgacatgttggatattgctgtgaggtcggctgtgcagaagcgtaaagggtctgcgtggggttggggttcctcgtttaaggatggttctgaggttcctttggaggctgtgtctttggcgtttatgggggctaaacaggctaggcgtggccgtcgtgatcgtagtggtaggaagcgggtgtctgtggtatgaactcggatgagttggctctgattgagggcatgtacgatcgtatccaaaggttgtcttcgtggcattgccgtattgagggctactatgagggttcgagccgggtgcgtgatttgggggttgctattcctccggagttgcagcgtgtgcaaacggtggtgtcgtggcctggtatagctgtggatgctttggaggagcgtctggattggcttggctggacgaatggtgacggctacggcctggatggtgtgtatgctgcgaatcggcttgctacggcgtcgtgtgatgtgcatttggatgcgctgatttttgggttgtcgtttgtggctgttatcccccaggatgatgggtcggtgttggttcgtccgcagtcaccaaagaattgcacaggcaagttttctgccgatggttctcgtctggatgcgggtttggttgtgcagcagacgtgtgatcctgaggttgttgaggcggrgttgttgctgcctgatgtgattgttcaggtggagcggcgcgggtctcgtgaatgggttgagacgggccgtatcgagaatgtgcttggggcggttccgcttgtgcctattgtgaatcggcgcaggacgtctcgtattgatgggcgttcggagattacgaggtctattagggcttacactgatgaggctgttcgcacactgttggggcagtctgtgaatcgtgatttctatgcgtatcctcagcgttgggtgactggcgtgagcgcggatgagttttcgcagcctggctgggtcctgtcgatggcttctgtgtgggctgtggataaggatgatgatggtgatactccgaatgtggggtcgtttcctgtcaattcgcctacaccgtattcggatcagatgagactgttggcgcagttgacggctggggaggctgctgttccggagcgttattttgggtttatcacgtctaatccgccgtcgggtgaggcgcttgcggcggaggaatctcggcttgtgaagcgtgctgagcggcgtcaaacgtcgtttggtcagggctggctgtcggttggtttcctggctgccagggcgcttgattcgrgtgttgatgaggccgatttttttggtgatgtgggtttgcgttggcgtgatgcttcaaccccgactcgggcggctacggctgatgctgtgacgaagcttgtgggtgtcggtattttgccggcggattctcggacggtgttggagatgttggggcttgatgatgtgcaggttgaggctgtgatgcggcatcgtgccgaatctgcggatccgttggcggcgctggctggggctatatcgcgtcaaactaacgaggtatgataggcgatggcttcgggtgttgcgtcgaggttggctgctaccgggtatcagcgtgaggcggtcaggtttgccgggaagtatgcgggctattatgccgagttgggtcgtttgtggcattccgggaagatgagtgacacacagtatgtgcgtttgtgtgtcgagttggagcgtgccggccatgacggttccgcggctatggcgggcaaattygtttcagattttcggaagcttaacggtgtgggtcctggtttgatcgtgtatgacgagtttgatgctgctgcggctttggcgaggtcgttttcgactatgaagattatgaatagtgacccggatagggcgaatgatactattgatgctatggcggcgggtgttaatcgggctgtcatgaatgctggccgtgacacggttgagtggtctgcgggtgcgcagggtaggtcgtggcgtcgggtgactgatggtgatccgtgtgctttttgtgccatgttggctacgaggtcggattatacgactaaggaaagggcgctcacgactggtcatactcggcgtcataagcgtggcggtaagcgtccgctgggttcgaagtatcatgatcattgtgggtgtacggtggttgaggttgttggtccttgggaaccaaatagggctgataccgagtatcagaaggtttatgagaaggctcgcgagtgggttgatgatcacgggttgcagcagtcgcctggcaatattttgaaggctatgcgtactgttggcggcatgagataatttgatgtggtttccggttgtgtatcgccggttatcggtgcacagggttgtctcccgcacgggggtcaacaatgttgtgttgttttccgcaaggagtgtagggttaggctatggccgatcagagtgttgaggaacagaatgttgacaatgatgttgtggagtccggaaaggataacggcattgttgatacagtaaaagacgatggcgggcaggaggtagccgacaatcagttgaagaatgaaggcgagggtaaatcgccggggactgattggaaggcggaggcccgtaagtgggagtctcgtgcgaaaagtaattttgccgagttggagaagcttcgtacatcgagtgacgattctggatctactattgatgagcttcgccgcaagaatgaggaactcgaagacaggatcaacgggtttgttcttgagggtgtgaagcgcgaggtggcttcagagtatggtttgtccagtgatgcgatcgctttcttgtcgggtggcgataaggagtcgcttgccgagtctgcgaaagctttgaagggtttgatcgaccagagtggtggtggcgcgggtgtgcgccgtcttgcggggagtgcccccgttgatgatgttaaacgacgtgagggtgtcgcgtttgtggatgctcttgtcaataattctaggagatgatttgtgatggctgacgattttctttctgcagggaagcttgagcttcctggttctatgattggtgcggttcgtgaccgtgctatcgattctggtgttttggctaagctgtcgccggagcagccgactattttcggccctgtgaagggtgccgttttcagtggtgttcctcgcgctaagattgttggtgagggcgaggttaagccttcggcttcggtggatgtttcggcgtttactgcccagccgatcaaggttgtgactcagcagcgtgtctcggacgagtttatgtgggctgacgctgattaccgtctgggtgtgcttcaggatcttatttctcccgctctgggtgcctcgattggtcgtgccgtggatcttattgctttccacggtattgatcctgctacgggtaagcctgctgcggctgtcaaggtgtcgctggataagacgaagaatgttgttgatgcaaccgatagcgctacggctgatcttattaaggctgtcggcctgattgcgggtgctggtttgcaggttcctaacggggttgctttggatccggcgttctcgtttgccctgtctactgaggtgtatccgaaggggtctccgcttgccggccagcctatgtatcctgccgccggttttgctggtttggataattggcgcgggctgaatgttggttcttcttcgactgtttcgggtgccccggagatgtcgcctgcctctggtgttaaggctattgttggtgatttctctcgtgttcattgggggttccagcgtaacttcccgatcgagctgatcgagtatggcgatccggatcagactgggcgtgacctgaagggccataatgaggttatggttcgtgccgaggctgtcttgtatgtggctatcgagtcgcttgattcgtttgctgttgtgaaggagaaggctgccccgaagcctaatccgccggccgagaactgatttatcgtagcggtgatgtgtcaatgtgcagggggtggtgttgatgggtatcattttgaagcctgaggatattgagcctttcgccgatattcctagagaaaagcttgaggcgatgatcgccgatgtggaggctgtggctgttagtgtcgccccctgtatcgctaaaccggatttcaaatacaaggatgctgccaaggctattctgcgtcgtgctttgttgcgctggaatgataccggggtttcggggcaggtgcagtatgagtctgcgggtcctttcgcccagactacacggtctaatactcccacgaatttgttgtggccttctgagattgctgcgttgaagaagttgtgcgacgagagtggtggggctggtaaagcgttcactattacaccgaccatgaggagtagtgtgaatcattctgaggtgtgttccacggtgtggggtgagggctgttcgtgcgggtcgaatattaacggctgcgatggccctttgtgggagatatgatatgaccagttttccttatggtgaaacggttgtgatgcttcaaccgactgttcgtgtcgatgatcttggtgacagggttgaggattggggtcatcctgtagaaaccgtgtaccataatgtggccatctattcttctgtgtcacaggaggatgaggcggcaggccgtgactcggattatgagcattggtcgatgctgttcaagcagcctgttgtgggcgctgattatcgttgccggtggcgtattcggggtgttgtgtgggaggctgacgggtctcctatggtatggcatcatccgatgtctggctgggatgctggtacgcaggttaatgtgaagcgtaagaagggctgatagattgtggctcaggatgtgaatgtgaagctgaacttgccgggtattcgtgaggtgttgaagtctcctggggtgcaggctatgttggctgagcgtggcgagcgtgtcaagcgtgccgcttcggcgaatgtgggcggtaacgctttcgataaggcccagtatcgtggcggattgtcgtcggaggttcaggttcaccgtgttgaggctgtggcgaggattggcaccacctataagggtggtaagcgtattgaggcgaagcatggcacgttggctaggtcgattggggctgcgtcgtgatcgtttacggtgatcctcgtgtgtgggctaaacgcgtgctcaaggatgatggctggctgtcggatataccgtgcacgggtactgtgccggatcaatttgagggtgacctgatttggcttgcgttggatggtggtccacagttgcatgttcgtgagcgtgtttttcttcgcgtgaatgtgttttcggatataccggatcgtgctatgtcgttggcgcgtcgtgttgaggctgtgctggttgatggtgtggatggtgatccggtggtgttttgtaggcgttctacgggtcctgatttgttggttgatggtgcacgttttgatgtgtattcgctgtttgagctggtgtgccgtcctgtcgaatccgagtaaacgtatttgttttctatattttgtttttgtttgattatttttgggggttgtgatggctgcaacacgtaaagcgtctaatgttcgctctgctgttacgggtgacgtctatattggtgccgctcacgccggtgacactattgatggtgtgaagacggttcctgacggtcttaccgctttagggtacctgtcggatgacgggtttaagattaagcctgagcgtaaaacggatgatttgaaggcttggcagaatgcggatgttgttcgcactgttgccaccgagtcgtctatcgagatttctttccagctgatcgagtctaagaaagaggtcatcgagctgttttggcagtcgaaggttactgccggatccgattctggttcgttcgatatttctcctggcgccacaacgggtgtgcatgctctgttgatggatattgttgatggcgatcaggttattcgctactatttccctgaggttgagcttatcgatcgtgacgagattaaggggaagaatggcgaggtttacgggtatggtgtgacgttgaaggcgtatcctgcccagattaataagaagggtgatgcggtgtctggtcgggggtggatgacggctttaaaagctgatactcctccggttcctccgaagcctcagccggatccgaatccgccgtccgataactgatacacattataagggattgttgatagatgagtgacacaggttacacgttaaagattggtgaccgtagctgggtgttggctgatgctgaggagacggcgcaggctgttcctgcccgtgtgtttcgccgtgcggctaagattgcccagtcgggggagtctgcggatttcgcccaggttgaggtgatgttttctatgttggaggctgccgccccggctgacgctgtggaggctttggaggggcttcctatggttcgtgtggcggaggttttccgtgagtggatggaatacaagcctgacggtaagggtgcctcgctgggggaatagtttggctccacggcctgattgatgattatcgtggggccatcgaatacgattttcgcactaagtttggtgtttctgtttatagtgttggtggcccggtgatgtgttggggtgaggctgtccggctggctggcgtgttgtgtaccgatacgtctagccagttggcggcccacctgaatggttggcagcgcccgtttgagtggtgtgagtgggctgtgctggacatgttggatcattacaggtctgctaatagtgaggggcagccggagcctgtggcgaggcctacggatgagcgtagggcccggtttacgtctgggcaggtggacgatattttggcgcgtgttcgtgccggtggcggggtgtctcgcgagattaatattatggggtgaatagtgtatgtctggtgagattgcttccgcatatgtgtcgttgtatacgaagatgcccggtttgaaggctgatgttggtaaacagctttctggggtgatgcctgctgagggtcagcgttcgggtagcttgtttgctaagggcatgaagttggctttgggtggcgccgcaatggtgggtgccatcaatgttgctaagaagggcctcaagtctatctatgatgtgactattggtggcggtattgctcgcgctatggctattgatgaggctcaggctaagttgactggtttgggtcacacgtcgtctgacacgtcttcgattatgaattcggctattgaggctgttactggtacgtcgtatgcgttgggtgatgcggcttctactgcggcggcgttgtctgcttcgggtgtgaagtctggcgggcagatgacggatgtgttgaagactgtcgcggatgtgtcttatatttcgggtaagtcgtttcaggatacgggcgctatttttacgtctgttatggctcgcggtaagttgcagggcgatgacatgttgcagcttacgatggcgggtgttcctgtgttgtctttgcttgccaggcagacgggtaaaacgtcggctgaggtgtcgcagatggtgtcgaaggggcagattgattttaacacgtttgcggctgcgatgaagcttggcatgggtggtgctgcgcaggcgtctggtaagacgtttgagggcgctatgaagaatgttaagggtgccctgggttatcttggtgctacggctatggcgccgtttcttaacgggttgcggcagatttttgttgcgttgaatccggtgatcaagtcggtgacggattctgtgaagccgatgtttgctgccgtcgatgctggtattcagcgtatgatgccgtctattttggcgtggattaaccgtatgccgggcatgatcacgagaatgaatgcacagatgcgcgccaaggtggagcagttgaagggcatttttgcgagaatgcatttgcctgtccctaaagtgaatttgggtgccatgtttgcgggtggcacagcggtgtttggtattgttgctgccggtgtggggaagcttgtcgcggggtttgccccgttggcggtgtcgttgaagaatttgttgccgtcgtttggtgctttgaagggtgccgctggcgggcttggcggcgtgtttcgcgccctgggtggccctgtcggtattgtgatcggcttgtttgcggcaatgtttgccactaacgcccagttccgtgccgctgttatgcagcttgtgggggttgttggccaagctctgggccagattatggccgctattcagccactgtttggtttggttgccgggctggtggcacagttggcgcccgtgttcggccagattatcggtttggtggctggtttggcggctcagcttgtgcctgtgattggtatgctggtggcacggctggttcctgtgatcacgcagattattggtgcggtgacacaggttgctgcaatgttgctgcctgcgttgatgccggtgttgcaggctgttgtggctgtgatacggcaggttgttggcgtgatcatgcagttggtgcctgttttgatgcctgtgattcagcagattttgggtgctgtcatgtctgtgctgccacccattattggcctgatccggtcgctgataccggtgatcatgtcgattatgcgtgtggtggttcaggttgtgtcggcggtgttgcaggtggtggcccgtattattccggttgttatgccgatttatgtttcggtgattggattcattgccaagatttatgctgcggttatcgtttttgaggctaaggttattggcgctattcttcgtactattacgtggattgtgaatcattcagtgtctggcgtgaggtctatgggcacggccatccagaatggctggaatcatatcaaatcgtttacgtcggcgtttattaacggtttcaagtcgatcatttctgccggtgttgccgcggttgtggggttttttacgcggcttggtttgtcggttgcctcccatgtgaggtctggttttaacgcggcccgtggcgctgtttcttctgcgatgaatgctatccggrgtgttgtgtcttcggtggcgtctgctgttggcgggtttttcgggtcgatggcgtctagggttcggaatggtgctgtgcgcgggtttaatggtgcccggaatgcggcttcttctgctatgcacgctatgggctcggctgtgtctagtggtgtgcatggtgtgctgggttttttccggaatttgcctggcaatattcggcgtgcgcttggtaatatggggtctctgttggtgtctgctggccgcgatgtggtgtctggtttgggtaatggtatccggaatgctatgagtggcctgttggatacggtgcgtaatatgggttctcaggttgcgaatgcggcgaagtcggtgttgggtattcattccccgtcgagggtgtttcgtgaccaggttggccggcaggttgttgccggtttggctgagggtattactggtaatgctggtttggcgttggatgcgatgtcaggtgtggctggtcggctgcctgatgcggttgatgcccggtttggtgtgcgatcgtctgtgggctcgtttaccccgtatggcaggtatcagcgtatgagcgagaagagtgttgtggtgaatgtgaatgggcctacgtatggggatccgaacgagtttgcgaagcggattgagcggcagcagcgtgacgctttgaacgcgttggcttacgtgtgattgggagtgttgtgcatgtttcttcctgacccgtctgatcgttctggtttgactgtgacatggtttatggatccgctgtttggcgacgagcgtgtgcttcatttgacggattatacgggtgcgtctcctgtcatgttgttgaatgattcgttgcgcggcctgggtgttcccgaggtggagcatttttctcaaactcatgttggggtgcacggttcggagtggcgcgggtttaatgtgaagcctcgcgaggtgacgctgccggtgttggtgtcgggtgttgacccggatccggtgggcgggtttcgtgacggttttttgaaagcctatgacgcgttgtggtctgcttttcctcccggggaggagggcgaactgtcggtgaagactcctgccggtgttgagcgtgtgctaaaatgccggtttgattcggtggatgacacgtttacggttgatccggtgaatcgtggctacgcccgctatgtgattcatttgacagcctatgacccgttttggtatggggatgagcaaaagtttcgtttcagtaacgcgaagttgcaggattggttgggtggcggcccggtcggcaaggatggtacagcgtttcctgtggtgttgacgcctggtgttggttctggctgggataacctgtctaataagggtgatgtgcctgcgtggcctgtgattcgtgttgaggggcctttggagtcgtggtctgtgcagattgatggtttgcgtgtgtcatcagactatccggttgaggagtatgattggattactattgatacggatcctcgcaaacagtctgcattgttgaacgggtttgaggatgtgatggatcgtttgaaggagtgggagtttgcgcctatcccgcctggcggttctcggagtgtgaatattgagatggttggtttgggtgccattgttgtgtcggtgcagtacaggtttttgagggcttggtgaacgattcatggctggttttgtcccgcagataacattgtttacgccagactatcatcgggtggcgcctatcaatttttttgagtcgctaaagttgtcgttgaagtggaatggtttgtcgacgctggagttggtggtgtcgggtgatcattccaggcttgacgggttgacgaggccgggtgcacggctggttgttgattatggtggtggccagattttttctgggcctgtgcgtagggtgcacggtgttggtccttggcgttcttcgcgtgtgactatcacgtgtgaggatgatattcggctgttgtggcgtatgctgatgtggcctgtgaattatcgtcctggtttggttggtatggagtggcgtgccgacagggattatgcccactattctggtgctgcggagtcggtggctaagcaggtgttgggggataatgcttggcgttttccgcccgatttgtttatgaacgatgatgagcgtcgtggacgctatattaaggattttcaggcccggttccacgtgtttgccgataaactgttgccggtgttgtcgtgggctcgtatgactgtcacggtgaaccagtttgagaatgcgaagtttgatcagcggggtttggtgtttgattgtgtgcccgcggtgacccgtagtcatgtgttgactgccgagtctgggtctattgtgtcgtgggagtatgtgagggatgctcctaaggcgacttcggtggttgtgggtggccgcggcgagggcaaggataggctgttttgtgaggatgttgattcgatggccgagggggactggtttgatcgtgtagaggtgtttaaggatgcccgtaacacggattcagagcatgtgcatcttattgatgaggctgagcaggtgttgtccgagttgggggccacgtcggggtttaagatcgagttggctgagtcggatgtgttgcggtttgggcccggcaatctgatgcccggggatttgatctatgtggatgtgggctcggggcctattgcggagattgttcggcagattgatgtggagtgtgattcgcctggtgacgggtggacgaaggtgacaccggttgcgggggattatgaggataatccttcggctttgctggcgcggcgtgttgctggtttggctgctggtgtgcgggatttgcaaaaattctagaaaagattaggggtttgttgtgggtattgtgtgcaagggttttgatggtgtgttgaccgagtatgattgggctcaaatgtctggtctgatgggtaatatgccgtcggtgaaggggcctgacgattttcgtgtcggtactacggttcagggtgccacagtgttgtgtgaggttttgcctgggcaggcttgggctcacggggtgatgtgtacttcgaatagtgtggagacggtgacagggcagcttccgggtcctggtgagacccgctacgactatgtggtgttgtcgcgggattgggagcagaatacagccaagttggagattgttcagggtggtcgtgcggagcgtgcccgtgacgtgttgagggccgagcctggcgtgtaccatcagcagctactggctactttggtggtgtcgtctaacgggttgcagcagcagctggataggcgtgctatagcggctagggttgcgtttggcgagtctccggcttgtgacccgaccccagtagagggtgaccgggtgatggtcccctctggggctgtgtgggctaaccatgctggcgaatggctgcagttgtctccgcgtatcgagacgggcactaagcagatccagtttggcgggtctgccgtgtatgcttacacgatcccgtttgagcggccgtttagtagtgcacctgttgtggtggcgtctatggctacggcggctgggggcacggcacagattgatgtgaaagcctacaatattactacaagtaaatttgatttggcgtttattacgaatgatggttcgaagccttctggtgtgcccgcggttgcgaattggatagctgtgggcgtgtgattatacaggtgttgtggtggctggtgtgatgttggggggctgtggtgtcgtggtttactcctgcactggtggcctctatttgtaccgcgttggccacggttttgggttctgttcaggctgtcacgtctaaatcgaggaagcgtttgcgtcggctgtcggcccaggtggatgctttggaagagtatatgtggggtgtgcggcatgaggttcgccggtttaacgccgggcttcctgacgaggtggagcctatgcatcttcctgatttgcctgagtttttgaaagatactgttgatggtggaggtgagcagggttgagggagttggaggaggagaagcggcagcgccgcaattttgagaaggcttcactgttgttgctgtttttgtcgcttgtactactagcggtggttgctgcgggtgctttgcgtttcggggctgtatcctctgagcgggattcggagcaggcgagggcccagtcgaatggtacggctgccaggggtttagccagccgtgtgaagcgggtgtgtgcttcgggcggggtggagtctgcgcggcttcaccgttctggtttgtgtgtggatgctgtgcgcacggagcggagtgtgcagggtgtgcctggcccagccggtgagcgcggcccgcaaggcccggctggtgtggacggccgggatggtgttaatggttcggccgggctggttggccctgttggtccgcagggttctcctggcttgaatggtgtgaaaggtcctgacgggttgcccggtgctagcggcaaggatggtgccgctggtgttgcgggccgtgcaggtgctgatggtgtgaacggcgttgatggtcgggatggttcggccggtgagcgcggcgatgtgggtccttcaggtcctgccggcccccaaggtgtacagggtgagcgcggtgccgctggtgtgaacgggtccgatggtaaagacggtaaggatggccgttctgtggtgtccgtgtactgttccggggggcgcctgtttgtgaaatatagtgacggtgtggcttctacaatatcgggctcggtggcatgccagggtgtggccccgtcacctgtggttaccgtatcatcccgcaaatgaatgatagtggaagggtgttactcatgttgatagtagtgtttgggggtggtgtgtggtgagatacattccagcggcgcatcactcggccggctcgaatagtccggtgaatagggttgtgattcacgcgacatgcccggatgtggggtttccgtccgcctcgcgtaaagggcgggcggtgtccacggcaaactattttgcttccccatcgtctggtggttcggcgcattatgtgtgcgatattggggagacggtgcagtgcctgtccgagagcactatcgggtggcatgccccgccgaatccgcattctttgggtatagagatttgcgcggatggcggctcgcacgcctcgttccgtgtaccagggcatgcttacactcgggagcagtggcttgatcctcgcgtgtggcctgcagttgagagggctgcggtgctgtgccggcagttgtgtaacaagcatggtgttccgaaaaggaaactgtctgtggctgatttgaaggctggccggcggggtgtttgcgggcacgtggatgttacggatgcgtggcatcagtcggatcatgacgatcctgggccgtggtttccgtgggacaggtttatggccgtagtctgcggcggtagtggtagkgaggagttaactgtggctgatgtgaaagctttacatgatcagattaaacaattgtctgcccagcttactggttcggtgaataagctgcaccatgatgttggtgtggtgcaggtgcagaatggtgatttgggtaaacgtgtggatgccctgtcgtgggtgaagaatccggtgacggggaagctgtggcgcactaaggatgctttgtggagtgtctggtattacgtgctggagtgtcgtagccgtattgacaggctcgagtctgctgtcaacgatttaaagaagtgatgtgttgtgggtaaacagttttggttgggtttgtttgagcgtgccctgaaaacttttattcaaacgtttgttgctgtgcttggggttactgcgggtgtcacgtatactgcggagtcgtttcgggggcttccgtgggagtctgccctgattacggccggggtggctgctgtcctgtcggttgccacctcgtttggtaacccgtcgtttgtggccggcaatccgaagacgcctatggatgctgggcttgttccaccggatgacgggggcttggttgagccgcactcggtggatgtgtcggatcctggcatgattgagccgatggatgatgcggatgttgccggctatgtgccgaagcgtgccgccgagtctgaggttggcacggtagagtctactgttgcataattgaatatgtgtgtgtgccccagcggtgctgccacgacgtgtggtggttgctgctggggcactatttttgtgtctacaggggttttacaggttgtcgtctagggtgtcttcgagtgtctgttgtaggagtgcacactcggcgagggtgtcttcagcctggtcgacaatgttttgttttgctatgcctggatagttgtcgcggtgattgtagatggcttccagaatgttgtctgccatgatttgtagtgttagggcctggttggtgatgcattccagctcgtctagggcggcctggctagcctccggttgccggttgtccggatgttctgcaaggttgcagtcccacaggatttcttggcatgcatccctggtgtctgcgtccacatcgatgtcgtctaggctgacaccgttggcgttgaggctgatgttgtcgaggttgatgtggacgcagatattcgctgctgatgctgcaggtgatgtttgcgagttctgtcatgtttcgtggctgctgctgtataatgcggcgggccgcggttttgagggctgtgactgttcggtgtctgttactgggcatcgtttctattcttcttccccggtgtagctggtggtgttggtgtactgggtgagtgtgatcaggcactggtcggcccactgtttcaccgtctgccgtgtcacactcaatcgttgggctgccaccgaataggtttgatcatacccgtagacttccctgaatgcggcaagccgtgctagccgtttccgctgtttggatggttcacatgtgagggtgtagtcgtcgatggccagttgtagatcgatcatggctacaatgttgttgccgtggtgttgtggcgcggttggkgggggtggcatgcccggttcgacactcggtttccatgggccgccgttccagatccattgggcggcttggatgatgtcggctgtggtgtaggtttggttcactggtcatccccggaataggttgtcgaggttgtctgggttgctggtgttggtggtgtcgaatcgtcccacacagtggcagtagtcgtacatgagtttgatgatgtgttggtggtcgccgaggtaggtgtttccgctgatgctgtaggtggctgtgccgtcttttgcgatggtgtatttggcggtgattgtttcgggtgtttcggtgttggtgatgattgctgtggtggtggtgcctacggtttgtagcctggtggtttgggttccgtcgtcgaggatggtagtaaccatgagggttgtcctttagatgctggtttggttgtcggctagatgaataatatcggataaaggtttcggctggtctaggtgttgtatggttttgttggctagccgtttggctaccctgtaacacattttggtatagtgtttgttgtctaggttgtggtattgttcccgcaccgcaatatatagtagggagtcttggtacaggtcgtctgcactgattgctgggtagtgtccggctgttttggtgcatgcccggttgagtgtgcggagatgatggtttgtggcccacacccacgatgcggtggtggccaggtctgcttttgttggtcgtctgctcatggcactatttcatctcgctatctggtagttgtttggtgttttgttgttgatagtgtagcacacgagtccggggttgccggtggtgcctgtgcggtgccggtaccagacggattctccttccatggatgggcattggatgaaggtgcgttgtccttgctcagagatttctaggtggtgccggtgccctgccatgaggatgtgagatgtggtgccgttgtggaattcttggccgcgccaccattcgtagtgttggttgttgcgccattggtgtccgtgggcgtgcaggatttgtgtgcctgccacatcgacggtggtggtcatttcgtcccggctggggaagtggaagtgaaggttgggatactggttggtgatctggtaggcttctgcgatggcgcggcagcagtccacgtcgaaggagtcatcgtaggtggtgactcctttgccgaagcgtactgcttcaccgtggttgccggggatggaggttacggtgacgttggcgcagtggtcgaacatgtggacgagttgcatcatggccatgcgggtgagcctgatttgttccgtcaagggtgtttgtgtgcgccaggcgttgttgcctccttgtgacacgtatccttcgatcatgtcgccgaggaaggcgatgtggactcgttcggggttgccggcttgctgccagtagtgttttgcagcggtgagggagcgcaaatagtcgtcggcgaatcggctggtttctccgccggggatgcctttgcctatttggaagtcgcctgccccgatgacgaatgcggttttactgtctgttgtggtgttgtctgttgtgggtggctgccagtcggctagcttagctacgagttcatctacaggatatgggtctgttgcgggttggtggtcgatgattttttgtacggatcggcctgtttccccgttcggtaaggtccattcggagatgcgtgtacggcgcacggttccgttggctagatcatcattaatggtgtcgatggcgttgtcgtggttggctagctgtgtgaggagccggtcaatattgtctatcactggttttcctcctccttctgggggttggtttgtttgcggcgataatctttaataacggtggctgagatggggtatccggcttgggtgagctgttttgctagccatgaggcggggatggttttgtcggcgagcacgtctgcggctttgttgccgtagtgttgaataagggtttcagttttggttgccatgatgtcctaggggttgtgtggtgggctgccatcctgtgcggcagtcgccgtcgtgtcctggtttgcgtgtgcaccacgtgatggttccgtctgtgtggtggagtgttttgccgcacatgacgttttgtagatgctccggcagtgcgccgtcatcctggttgctggtttgtgtgtcgaagagtgttttctggttggtgaaatgctctgacacggtgccgttatgcacgggtagtatccatgttttccattgttgttgtagccgtgtgttccagtggaattgtttggcggcgttttctgcctgttttatggttttgtagtagccgactagtatgcgctggtgttcactgtcgggtgggttttggcctcgccagtattgtgctgctacggcgtaacggttgttttctgtgaaggtgttccagcagtattcgataatgttgttgagtgtgtcgtctgtaacatctgtgtcgctgtttagtgtttcttgggcgatgatgtcgcggatggcttgccgattttttgtggtgggtttgaaggtgatgctcacgatagtaccggctcgtcttgcaggaactggttgaaggtgttgttcccggcgtgttgggcttgtgtgatgtcctggtcggtccagtcggggtgttgctgtttcagatagtaccagcggcacgcattgtaggtttcgtcttgtagccgtgtgagatggttttcggtgatgatttgtttccacattgtccatgacacgtcgagccggtccaatatttccattgctgggatgttgaattggtcgaggaagagtatttcgtgggtgtagtattccttctcgtactggtcccatccgcttcggtgcctgttgggctggtttttggggtaggcttcccggcatactttgtgcaaacgtttggccatgtcgtcgggtagtttaatgtcagggttggcgcggatcatggatcgcatcccatcataggtggtgccccaggtgtgcatgatgcggagtgggtcttcaccgtcggcccatttttctgcacagatggcgaggcgtatacgcctcctggctgtttggctggtgttgcgccggttggggatggggcacgtgtcgaggggatccatgatgttttagtgtacctttctggtttcgtgttgttgacgtgttttactgtagcacagtgtttagtgcttgtgtcaaccctgtttttccggcctgcaggtaggtgtctgtgacatcccccagggtgaggggcacgtggatggcttgggggagtgcggtttggagggtttgggccatctggtctcccgctttgtctgggtctgaccagatgtagatgtggtcgtagccttcgaagaatttggtccaaaagttttgccacgaggttgcgccgggtagggctacggctggccatccgcattgttcgaggatcatggagtcgaattcgccttcgcaaatgtgcatttcggctgccgggttggccatggcggccatgttgtagatggagcctgtgtctcctgccggggttaggtatttggggtggttgtgggttttgcagtcgtgcgggagtgagcagcggaaacgcatttttcgtatttcggctggccgcccccaaacggggtacatgtaggggatggtgatgcactgattgtagtcttcgtggctggggatggggtcattgtcgatgtatccaaggtggtggtagcgggctgtttcttcgctgatgcctcttgctgagagcaggtcgagtatgttttcgaggtgggtttcgtagagggccgaggctttctggattcggcggcgttccgcaatgttgtatgggcgtatgctgtcgtacattcgggttttcttcttctaatcgttgttgtagtttggcgaggcctcctccaacaccgcatgtgtggcagtaccagactccttttgtgaggttgatgctcatggagggctggtggtcgtcgtgaaacgggcagagtatgtgttgctcgttcctggatggattgtaccgtatgcggtaggtgtcgaggaggcggcaggtgtcagaggtgtgggaggagctcgttgagggttgataccacataggcttcactccatggcttgttgcgctgtttcatcacgacgagtccgatagtggactggctggttttgtttcggtgtgtttcgtagttgcgcgcctcggttgtggcttctttcacgaattgagccaaatgctgctggccagccttggcttcgatcacatatgttttgttgccggttgtgaggatgaggtcgccttcatcttcgcggccgttgaggtggaggcgttcgatattgtggccggtgttgcgtagctggtggaggagtcgtgtttcccattcggcccctgcccgccggttgcgtgcctgctgtgttggcattgtttagagtcctttgtgtgttgtggtcatgttccagggctgtttttcgacgaggggcccaaaaaaggtgtattcggggtaggctcgtagccgctcgtatcgggtgccgtcggggctggatttgcctgtgcgctgtttgagtacggcgatgcgtgcctctgccggtatcgatagcccgttgccgttatcctcaccaccatacaatgagactccgaggatgagttgtggtttttcggagaggccgtttttgatttccctccggtggggcgggtgttcgatgtcggatccggttttgtcggtggcgtggtgggkgacaataatggtggagccggtatccctacctaatgctgtgatccattgcatggcttcttgttgtgcctggtagtcactctcgcagtcttggatgtccatcaggttgtcgataacaatgatggggggaaagtggttccacatttccatgtaggcttgtaactccatggtgatgtcggtccatgtgatgggtgactggaatgagaatgtgatgtgttggccgtggtggatgctgtctcgatagtattctggcccgtagtcgtcgatgttttgttgtatctgggcggtggtgtgttgggtgttgagtgagatgattcgtgtggaggcctcccagggtgtcatgtcccctgatatgtagagggcgggctggttgagcatcgctgtgatgaacatggctagcccggatttttggctgccggagcgccccgcaatcatcaccaaatcccctttgtggatgtgcatgtccaggttgcggtagaggggttctagctggggtatgcggggcagttcggcggctgtttgggaggctctctcgaaggatcgttgtagagagagcatcgggaccttaatctatctatcggttggatgtgtattggtggtcagatggagtcaatgtctacatcatcgctgccagtggtgttgggctggctgtctcgcttgtcaacgtaggctgctacgaggtcgtagatggcgtcgtcgaggggtttgaggatgacagcgttgaatccgtttttggtgcgcacggtggcgagtttgaaggcctgctcctcgccaaggtaggtttcgagttcgcggatcatggagtgtgggcggtcgttgttgcctcgcgctttttcgatgatggcgttggtgrtggtttctggggtgccgttgttgaggtcgtctagggtgtggaagatggtgacatcggcgtagatgcggtcggcgacctgtccgccgtagccttcagtgttgtgttcgacgtcgtgtactttgaagacgatggcggtggcgtcctggtttttggacgggttgaagaaggtgctgctgttgctgttgttgcggtagttggcgagtcccataacggtatcctttgcttgctttttgtgttgttttgttggtttgtgtcggtttttatcgggtgrggttgttccgtttagtgcggaaagcctcggatacgtcactgttactggtgatgatctttttgtactgtttgagtagatcggctagctgtgccttgcttgttgctttgttgattttgttgatgatgatgtcgttttcttgattggcaatattgtttacgtagtttttggcggcctggttgtatcggtcttggaggatgatggatgcgcttgctaccaaggtggctaaatcccagtctttggatacggtgttgtctttgagcccgccgaggaggtcgatgatagtcttcttcacctggtcggcggtgtcgccgcggatgacggtccatggtgctgcgtagtctccaccgtatttgagtgtgatcgttaggcgatcattgtctgtgatatgctcgtcgatcatttggtgtccttttctttatggtctgtttctggtggctgtacggtggtttctatcgggtatctgtacgagtttttgccgttgacggcccagcaggcgtcttgtacggggcatcctttgcagagtgttgtgacgtgtggtacgaagattccttggctgattcctttcattgcttgactgtacatggatgatacatgccggtaggtgttgttgtcaaggtcgtagagttcggttgccgtgccttgtgtcggggatttgttgtcgttgcgactggtggccggcgtccaaaacatgccttttgtcacatcgttgccgtgttggttgagcatgtaccggtatgtgtgcagctgcatactgtctgctggtaggcgtcctgttttgaggtcgaggatgaatgtttcgccggtgtctgtgttggtgaagactcggtcaatatatccgactatttttgtgtcatcgtcgaggatggtttctaccgggtattcgatgcccggcttgccatcaataacagcgatagcatattcggggtgactgtttcgccagtgtttccacctgtccacaaagacttggccgtagagcatccaccagtcgtagtcttttttgttagggcccccactttcgcacatgtttttgcatactctgccggagggtttgatttctgtgccttcggattcggcgagggcgacttgggtgtcgaaaatgtttttgaaggatgagagtttgtctggtagtgcagggtattcggtggggttgtacaggtggaggtcgtactgttcggtgatgtggtgtatggcgcttccggcgatggtggcataccaggtgtggtgctgtgcatggtagccgtgttggaggcgccatttttctccgcattcggcccactgcgacagtgagctgtaggagatgtggcctggatggttgatggttttcggatattgtgctagaggcattacttgtcgcttttgttccatgggttgcgggtgtcttggccggcgtggtgttgctggtaggcgaggagtgcgaggcagtgccaggctgcgtgtgccagatgcggcaaatgtgattcgtggtcgaggttgttgccttgctgccatgatagtagatgcctgtagagggcgtcgacactgtggctccacgggtatcctccggtccagttgttgtcgccgtatttggkggcgccgtatcctgccacagagcctagatcgtgcaaggctgcggggtcgatgagggagagcctgcagagtttgagttcttttcgggcacctgtgttggggtcggtgtacatgcgggtgggctcatccatggggtgtgtgctccttaagggtgggttactggttgttgttttgggctagggctacggcgagaataatgatggcgagggtttcagcaatgatgatgggtgttgtgatcatttagtattacggggattgttggtgagggttgaggcacctagtagggtggcgagggcgcatgcggcgatgatggcgagggcggctttgtggctggtgcctgttgcgtacatccatgtgatgatgccgccttggatccaggcgaggctggtgaagaacgtttcgtagctgtggaggttggcgtcggttggtgtgttcattcttgttcctcgatggtgtggttgattgttttgtagatgtcgtatagttgtgcttcgatttccagtagtgtgtttatttcgtttgtgaggtcgatttctgttttgagtgtgtctattctggaagcgatgtcagtggctgtttggagtgagagttcggcgccgtggatgatgtggccgatatcggagaggccgactttggctgtgtagtctgacatgagagacattggacgtccttagcgtgctgggttgatggacaggtcatctacctgtgggttgtcttctgtgccggagacttggcagaagactttcacctgcgtcttggaagcgccaggttggcgtgccgtagccccgtaggcgatcgagaaggtgtcttttttgctgccgatcactttgtggaggaagaggtcgatgtccgggttgccgttccatttgacgccgttttctgcggcaatctgggtggctttggcgtcgcaggcgtgtgctgccgtaattatggtgagtccggttgcggtttcttcaccccttgattgggcttgcttgtgggttttggcctgctcggcttgtagggagcggactgctgcggcctgcttggctgctttttcggctttgcgctgttgggtagtcttgggggtccatgtggtgttggctgtggtggcttgtggggcgggttgtgaggtgagtggcggattgtcgtcaggtgcagggaggaaagagcatgcggcaataatggcgatagtggcgcctgcgatggtgtagccgtttttcttgttcatgttttgtgtcccctttccggggtgttgttcgttgctgacatgatcaataatggtgtgggcggtggcctgtgtcaaggctgcgctcaacgactgtgagcgtttggtgtgtggcttggggttttatcgggcgcatagggtgagtaggtggccgatgttgatgcgggtcacgttccagtagagttgcgkggcttcaccgccagtgagcggcttccactcatcatggctgaacacggtgccgtcggtggctatgaatgtgttggggcgtagcttgtggagttcggcttcaacatgctgccggtagacttcggcgaggccctcaaaatccaggtggtcgcaggagaggttttcgaggcgtgtcaagtcgaaaggctcagggcagtcgtagctggctgggctgtagagctgggtgaagtggtcggcaatcttctgcatgacgggttccttttctagtgtgtggatggtttttatcgggtggatgcgacaaggatggcgtctacgtcgatcatgtcgatgagatcgtggagttcctcggcctcattctcagataggtggcgccagtcgtagtcgccgtacacggcgccgtctagggtgacagtccacagtggccggatgagccgtatggcttcttgtactttagcgtggtacatgcggcgcaccatatccagatcgatgtcgtctgaatggtttccggtgagactgtcgaggctgagggggtcgatttctgtctgcctgtagagactggtgaaggatggtgtgatgagtgtgccatccatgggggtgctcctttctggattgtttgggttggttgttgtggtttctagggtgtgcaggttgtgacccacagtcaaggctgcgctcattcggattgagtgtttcatgctggagtgtcgggtgtgacagatatcactgaagcctttattgcctctctcagcgtctcaaatcttctgggggtaggattatgcagggttgaccctgttagtcgattctagaggccttctagggcgtctcaggggtatgtctgggggatagcaggtccggtagatgacccagcagatctaccttggctttcatcacgggagtcgaggtgccatatttgggcatgggatctccaccctcatactatgtgagatgtaccacatcctcctggcttgatgtgcactctcgaggccactctaccgatctggcgtggagggtgtagcccagaaatgccgtttaaagccttcacacggcgcctaggagcgtcttgcagggtgggggctaggtatttatacccccagcacattctggtcgattctagacgcctacaggagacagatacgcgatcaaccctctcggcatagatcatcagcccctaccctgcttagctaagcctgcactatgtggacagtgttggatgctgtgggggaagaagggcacggtaaaagaaagaaggggggagtatcagccttcacgcctgaggtacttaagttaaccttaaggtcttagcacttagcaccgagcccctcaagggctcggcatcagcccgaacaggctcagctgatccggcatagccttagcaagtacacgccatcagggaaggcttgagagtacgaggagcctcagcgacgagtactcgaaagcctgagggaagaccatcagcacatcaacgcttagcgtgttcggaaaggacacaggagtacagtgtgagagctgttcgggagtgaaacccgttctggctaggggtttcagccttaaccacctgtaaaggttacaagactctaagaaaatttaaggaaaagtttaggtttgatttttggacctttactaccaaaaacacccgtttacacccctcaaacccgcctatagagccaaacgccggtgttgagggtatctctacctagtgtgataggctggacaggtagccagctggacgcaaggccagaaagtgctaacgcacttcccgacctcgcttaccatcagtctaccaaagacttaaaagcttaacagctaagcgctaagcccttaagacctcaacgcttagcaccgagcccctcaagggctcggcatcagtcctaaggcttaaacacttaaagtaactataaagctttaaaagcttaacacttaataatttaagtaaatataaaaccttaacagttaaacgtttaaagctttaaaacttaacactacagtaagagttaaaagcttataaaccttaacacctaagttaactataaaaccttaaagactaagcacttaaggatataaacttaacatcagtgtttaagactttaaaacttaaagtaactataaaacattaaagctttaaatacttaaagttaaccatcagtcttaaactttaatattataacctataagctttaagacttataggtattataatatattataattatataagttataaaagttttagaagagtaaaggggttaacttctttacttctctactctctttggttctttctctcttctcttcttttcttcatcaggggagaagaggaaccttttaccgtcagcgctgatggtctttcgccgtgtgtctcgtgtgcttggtcgcaagctcccgtcgcacactctccacactcttacacccgtgtccttcttaggcttggcgtgttcggctgaaggcgtacggcgtgtcacgctaacacccttaacataaggtaagacttaaagtgtatattatatgtagaagactttaaaaaccttaagggtgtacacgttttggctgtgccctacaccgctaggcgtcaagcgctaagccttaaaacgcgaacacacacccaccccccttttttctttcgtgtccttctcttttgacaccgctggggggcgatgtgacatttctcacacccgtgggggtagtggagaaaacaaacaccccaccacagacagaacaccccctcaaacgcacaaaacagcccctagaatcgattagcagggcaagggcaaggtattcatacccccaacggtttccaggccgttacagaggcaaacaagacccgtacaaggctaggcgaggatcggagacgtgatggcacacaccaaccgcaccgcatcctcagcccaccgccgctggcggcaacgactcatcacccaagcccgacagcaaggccaaaccgaatgcccactctgcggagtcaccatcacctgggacacctaccagctaccaaccagccccgaagccgaccacatcacaccagtcagccgcgggggactcaacaccctcgacaacggccaaatcatctgtagaacatgcaacagaagcaaaggcaacagaacacaaccaaacattcaattccaacaacaaaccacaaaaacattgattccgtggtgataaaacccgccaacccccaccgggaccatcccctgcacacccgtgcaa

SEQ ID NO: 51 - DNA, 2299 bp, Propionibacterium acnes
  source 1..2299: mol_type = genomic DNA
ttggtcagcgcccaccgatgccttacaccgtgacacgctcgaagtggcgatggaacacctacgcttcgaacctgattcgatcgcttcggtggcctcctgctgacgctttcatggatcgtgtcagcctggaggatggtaatgcgcccaaaactgtatgtcttcggtagatctgcacaagcggatcatctcgcgcaagaaggaaccgtgaggtactcgatccggtacactctccacatcaaaaccaacaatacaagtcacagtcatagatagttgtgtcattaacaagaaatcccaacagcaccccaatgcaaaattgcacagaacgacctagccagatgattttcagcaagtctaccatgacagcaaaggccgcagatagaaactgtgacatatacattgcacgctgaacttactaccccaccactaaatttacatagattccataccgacccgaacgccaccagtcaaccatcagtaatcatcatcgagaagtcaaaaataaccaacaccattgataagatccatgccatggacgggcagacgtctgtgatcagcagagtcgagaaacgaggtaaagcaaactatcacgagccaccagataatacccctagaagcttgtccaatatgttagctctggttaacatgccatcgccagcacaagattaacacgcttgttcatgtcttcagaaagcaacgaagctcgcctagatacttggacatttatatccttgcaaacccccccctaaagcctccaaaaatccttgatttacctcactaatataccattaatttgccccacctcaagccaacaaaagaacggagcatcagagccataggaagcctccgccagacataggggactaaacattatctccttctacgtcaccaactagaattcataaagcatcaacctacttatttaattcgatctaaaatccaatatccttagtatcagggatcaataaaaccaaaattaggaaacatacttaaaatcatgacatttcacttagtagacatactttgggattgtatcgacgcgtgacattgacacccatatttctgcggcagaatgcaccccggcaatccattgccaacatgcatgacacaccagcccatcagacccgaggtgaggtgatacactgttggagttagttcctggtacgcaaaccgcacagcccggtaggaagtccgggcggcgcaatagacgtccgtcgctcccctcatggagaatccagtgtcgccaggtccgcttcggcgtactgggagatgatatgcctacgatgttcactgtctacttcgatggccagttctgggtcggagtcctagagaggcgcgacgagggtttggtgcgtgccgtaaaagtcacgtttggcgccgaaccgtctgacacggaattgtacgagtgggttagccgtcatggcaacgcacttatagagcgattggagtctaccgctgctgtccctaccacccgcagtccccgagccaagcgactgaaccccaagagggcgttacgagatgcagcgcgagctgcccaagcaccccgtgccagcacggccgcacaggccgcgcttaaggccgatcaggaagctcggggtcgcgccgccacagtgaagcgcaagcaggcccggatcgacaaagctgcggagcagtgggctaagaaacgagagcgcgcgaaggcaaagcaccgtggccactaatgcgtcgaccgtgcccttcccaactgtgattcttggttcgggacctatggcttcacggtcaaggcggtcaaatcgctcacacatgagtactattcacccgacatgccatcgtctgggcaatcacccaactgcaagctgatgacgttttcctcctaggcttgatgcactagtttagtgtggacaggaagactcatggcgaagggaacggcctgttctcaagatcgccaccgcgaacgagattcacttcccacggtgtacgcatactaaggggcggagcttgtctgacatcatctgggccagcacgcacatggcccagatgatgcccaccggatggtgagcctgacccgtaacaagaacgcatcagcgagcacctcgccgacgcggctgcgcacgcggtcgtaacctcgccactgcctgcgtgaacaacgcgcttcggcgcattcaacacgccgtgaccgcggcgcccacggcttgcgcaaccgctacaactaccacctactgtcgcctcctggtcgttggcggcataacccataaccatcttcaaatccgaagcgccgagtcctgccataattcgaaccttcagcctgcatgactggaacaag

SEQ ID NO: 52 - DNA, 2299 bp, Propionibacterium acnes; identical to SEQ ID NO: 51
  source 1..2299: mol_type = genomic DNA

SEQ ID NO: 53 - DNA, 2299 bp, Propionibacterium acnes; identical to SEQ ID NO: 51
  source 1..2299: mol_type = genomic DNA

SEQ ID NO: 54 - DNA, 2298 bp, Propionibacterium acnes
  source 1..2298: mol_type = genomic DNA
ttggtcagcgcccaccgatgccttacaccgtgacacgctcgaagtggcgatggaacacctacgcttcgaacctgattcgatcgcttcggtggcctcctgctgacgctttcatggatcgtgtcagcctggaggatggtaatgcgcccaaaactgtatgtcttcggtagatctgcacaagcggatcatctcgcgcaagaaggaaccgtgaggtactcgatccggtacactctccacatcaaaaccaacaatacaagtcacagtcatagatagttgtgtcattaacaagaaatcccaacagcaccccaatgcaaaattgcacagaacgacctagccagatgattttcagcaagtctaccatgacagcaaaggccgcagatagaaactgtgacatatacattgcacgctgaacttactaccccaccactaaatttacatagattccataccgacccgaacgccaccagtcaaccatcagtaatcatcatcgagaagtcaaaaataaccaacaccattgataagatccatgccatggacgggcagacgtctgtgatcagcagagtcgagaaacgaggtaaagcaaactatcacgagccaccagataatacccctagaagcttgtccaatatgttagctctggttaacatgccatcgccagcacaagattaacacgcttgttcatgtcttcagaaagcaacgaagctcgcctagatacttggacatttatatccttgcaaaccccccctaaagcctccaaaaatccttgatttacctcactaatataccattaatttgccccacctcaagccaacaaaagaacggagcatcagagccataggaagcctccgccagacataggggactaaacattatctccttctacgtcaccaactagaattcataaagcatcaacctacttatttaattcgatctaaaatccaatatccttagtatcagggatcaataaaaccaaaattaggaaacatacttaaaatcatgacatttcacttagtagacatactttgggattgtatcgacgcgtgacattgacacccatatttctgcggcagaatgcaccccggcaatccattgccaacatgcatgacacaccagcccatcagacccgaggtgaggtgatacactgttggagttagttcctggtacgcaaaccgcacagcccggtaggaagtccgggcggcgcaatagacgtccgtcgctcccctcatggagaatccagtgtcgccaggtccgcttcggcgtactgggagatgatatgcctacgatgttcactgtctacttcgatggccagttctgggtcggagtcctagagaggcgcgacgagggtttggtgcgtgccgtaaaagtcacgtttggcgccgaaccgtctgacacggaattgtacgagtgggttagccgtcatggcaacgcacttatagagcgattggagtctaccgctgctgtccctaccacccgcagtccccgagccaagcgactgaaccccaagagggcgttacgagatgcagcgcgagctgcccaagcaccccgtgccagcacggccgcacaggccgcgcttaaggccgatcaggaagctcggggtcgcgccgccacagtgaagcgcaagcaggcccggatcgacaaagctgcggagcagtgggctaagaaacgagagcgcgcgaaggcaaagcaccgtggccactaatgcgtcgaccgtgcccttcccaactgtgattcttggttcgggacctatggcttcacggtcaaggcggtcaaatcgctcacacatgagtactattcacccgacatgccatcgtctgggcaatcacccaactgcaagctgatgacgttttcctcctaggcttgatgcactagtttagtgtggacaggaagactcatggcgaagggaacggcctgttctcaagatcgccaccgcgaacgagattcacttcccacggtgtacgcatactaaggggcggagcttgtctgacatcatctgggccagcacgcacatggcccagatgatgcccaccggatggtgagcctgacccgtaacaagaacgcatcagcgagcacctcgccgacgcggctgcgcacgcggtcgtaacctcgccactgcctgcgtgaacaacgcgcttcggcgcattcaacacgccgtgaccgcggcgcccacggcttgcgcaaccgctacaactaccacctactgtcgcctcctggtcgttggcggcataacccataaccatcttcaaatccgaagcgccgagtcctgccataattcgaaccttcagcctgcatgactggaacaag

SEQ ID NO: 55 - DNA, 26003 bp, Propionibacterium acnes
  source 1..26003: mol_type = genomic DNA
cccgctcactgccaacgagacatcacgcagcagcggccgaccatcggccagcgtgtacgtcaccgacgcgacatcgagacgaaccatgacccaaaagtatcacacgtgtgataaatggaggttgagtatggcggcctgttcacttgatcaggcatttcttttagtgaggcctggggcgtaaccacttgtctgcaccttagagctgccacgcctcttgcagatcgaggcagaggaggctgcgcgggggtcgtggcgtgcggtggcggggtttgatgtcacgttcagtgtgccgaagtcggcatcggtgttgtgggcggttgcggacgcggggacgcaggcgttgattgcgcaggcccatcatgagacggttgtggcggtggttgcattcatggagtgcgaggttgcagccatccgcacgggtgcaactgctggggatggcgcggttgcacaggtcgacgtgacgggtttgatcacttcgattcccgcgccggggacccgcacttgcatacgcatgtggtgatcagcaacaaggcccgcacggtcctggatgggaagtggcggagtttggatgggcgttcgatgcatgccgcggtcttggcgctgtcggagctgcacgaggccgtgttcgccgatcacatgacccgcacgttcggtgtgacgtaggagccgcgggagatgggccaggaccggaacccgtcgtgggcgatcaccgacgtccccgaacagctggtggcagagttctcgacccgcgcccggcacatcaacgaggcgaccgacgcgctggttgctgactacgtggcccagcacgggaagcgcccttcgccggcgaccatcatgaaactgcgcgcccaggccacgctcgcgacccgtccggagaagcaggtccgctcacttgcggagctaacagccgagtggcgcactcgtgtcagccagcagctcggtgtggatgccaccgtgtgggcgcggaccgtcacgggtggggagcggcagttgctgttgcgggctggtgatgtgccgttggatctgatcgaggggtggggcggtctgtagtcgagatggtcggtgagaagcgttcgacgtggcggtgctggaacctgatggccgaagtcgcctgccagactgtggggtggcgtttcgccaccgttgaggaccgcgaagtcatcaccgcgatggttgccgacgcagcggaacaggcgtccttacgcctgaccccacccgagctagcgaccagcccggcgaagttccgccgcccggacggcactagcgtatttcgtccgaagcactccacggtgttctcctccgacagcctcctggccgcagaggaccacctcctgcaacgggcccgcaccgcgaccggtccgactatcgacctgaccaccgtggggaccatcacgagcaaggcggacagcgagggtcgggtgctcggtcccgatcaggccgcagctttggcgtcggtcgcggtcccgggccgggtggtggatgtgttggtggggccggcgggggctgggaagactgcagcgatgaacgcaccgcgccgggcgtgggagacggagcatggtgccgggtcggtggtggggttggctccgtcggcggtggcggcccaggtgctggccgatgatctgaggattgccacggagaacacggcgaagtggtggaccacccaccaacacaccggcgtcactttcaaggctggtcagctggtcatcatcgacgaagcttccctcgctgagaccctctctttgaatcggatcacgctggctgctgaggaggcggggacgaaggtgctgctggttggcgactatgcccagctcccgtccgtcgatgccggtggtgcgttcagcctgttgatccacgaccgccacgatgcccccgagctggtcgatgtccaccgcttcacccacgcctgggagaagaccgcatccctggagctgcggcacggccgcaccccggtcatcgacacctacctggcacaggatcgcatccacgacggagacgccgaggccgtgaccgctgccgcttacaccgcctggcgccacgaccggcagcaggggttggcgtcagtactgatcgccgaaacccgcgagaacgtcaccgccctcaacatccacacccgcgctgacctcatcctggacagcacgttgaagcctggccccgaaatcaccctgtccgacgggtccatggcaggcgtgggtgacacgatcatcacccgccgtaacgaccggcggctgcggaaccggcacggctgggtccacaacggccaaacctggaccatcactgccgtgcgtgacgatgggtcggtcacgatccgcccacccagtgcccggttcggcaacagcatcgtcctacccgccgactacgtggctgagcacgtcgacctcggctacgccgtcaccgctcaccgcgcccaaagcatcacaccgacaccgcccacgtcctcgtcgaacccacggcgacgcgggaaacctgtatgtggctatgacgcgcgggcgcgaatcgaaccgggcctacgtcatcctcgaccgtgccgacgaccacgccgccggcgccgtgtgccgtgtgaactcggtcgacagccccggacgctgggtcgcgcggtccgtgatgagttcgtcgacgtcggcagcggaggtaaccaggcgtgcgtggccggtacggagcagctcgtgcgcaccacggctggtgacaggccccggcaccgcaccgacctggcgtccgagctggtgggcctcggacgctacccgaagcgcccccgatcgcgcgccggcctcaacgaccaccgttgctgctgacattgcctccaagcagtcgggagcgggctaggagccgatgccgcgtcgacacggatccgggaggaagctcgctggtcagcgcactcacatcacccacccggtccagcaagtcacggtggccgctcgggtcggggcggttcacgccaccgccaacaccgcacggtgcacagcagcctcgacaccattaagcgtcaccagccaccagtacacgctcacggttcgcgaggtcgccagccagctcggcggcgacatgctccccatacgcggaagccgcccgagaacccgtgaccgtcaccagatcgttccacggtcgcgccaagaacgacgccgcgccccgcacgaacagaataaacggagcgcggtcgcccagatcatccagcgcctgtggccagtgcgcgtcacccggaatcagagtggcgatcccgctctcctcgaccatgcgcagccgctgggcgagcccatccagcctgcccggtgaggtgaggtggtcacgccacacctgaccatcaactcgactcagaccaggcacggtggtcgtgtcggtgtcaagcagcccgagcgtctcaacggcacccaggcggcgcatcagcccgcccgtgacgggatcatcaggctccgccaacagcgccagcaccacccgggcacgacgttcatcaacaccaagcccagcaacaccagacatgacggctcctcctcgaacagacttcgccgaacaggtgcgccaacgcagcccgcaggtgtcgcgacgtcctcagcccgtggaggctggcgaacgcggtaacattcgacagtcgcacggttcggcagctcgacacagcagcgtgctggtgttgctttggaggagtccacgggcctcgccccccacaacggtgacttcaatcgacattgtcgttgttggtgatcgaggtgtcaccgcagctgcgaacgatagtcttgatctggacaacgatttcgatgcggaggaaagcacatgaggctcacacgcttcaaggtcgagaaccataggcggttggccgacctcgacattgaggtgcgcgaccaccttgtgctggttggagccaacgacgttgggaagtcctcgctgctccggtgcctcgatttgctgctcggggcgagtacggcgcagctctactcccgtatttcggccgacgatttccgagcccccgaccaaccgttcgtgattgaagggactctcgcggacttcaccgatgtcgacaaggctctgtttcccgatgagatccacgtcgacccgaacacgaatccttcgcgtctggtgattaggctcacggcgactgtggatgagaacgagacggtggtgatcagtcgttcggcccccgagggcggaacaggacgccagctctcacgggatcaggtgcttggcctgggatggaagttcctcagcgcaaccgcccagacccgcgaccttcgggaagaccgaaagtcggcactcgacgacatccttcaagctgtcgacttgggtgaagaggaggccgcgttcgaagccatcgcaaagagcctgacgaccaccttgggtagctctaaggtgcttgaaggcctccgaggttcacttgctgaccagctgtcgaaggctctgccggacaaggtggcacaggatgacttggcgttcgtgcctggagctgctgccgacaatgacgtcctcagcgacgtgcggctgcaagtcagcaagcaaggcgtggcacccgatctttccgaacagtcagacggcacgcgagcgctctacgcgatcgccctctacgatctgatgagcgtcggcgctaacatggtggggattgacgagcccgagatccatctacacccgagcagtcagcgaagcctcgcgcgcctcctgcggtcgaacgccaaccagaaggtcatcgctacgcattctgccgacatcgtaggagccttcgatccagattctattgtcgttgtgcggggcggaggcgaagccgttcaacccaaggctggattcctgtcggacgatgagcgaatggcagtacgcctgtgggtgagggatcggctcgaaccactcactgcacgtcgtgtcgttgtcgtggaaggcatctcagatcggatcatcctggagcacctggccgacctcaccgaccgaaatctcgaccggctcggcgtgtccttgattgaggctggcgggtgtggcgacatggggccgctcgacaagctctttggtgccaatggcttccgtgtatccatgtcgcaactcatcgatgcagatgcagaagaggcattggcaaagaaactgggagtcgaagttgctgaccttgcaggccgatccgtctgggtctcgcgaagcgacctcgaagacgagtacgttcgtgcgctcggctcggacgccgtgtggacagcactccagtcaaatggccacttctcgaagaatgaacttggcaactgcgcagcaagtgggccggctggcacgcgtaccgagatagatgttgctgccttctgtcgacgaaaggcgtacaaagtaaatgccgcgctatcagtcctgccgctcttcacggcggcgaatgccacgcaggtgtcgtctatcgagagtctactcgaagagatcgtggcgtagatggtcagcccgactcagaagcagattgacattagggacacgcgggttctcgatcttcttgtcgttgctcctgcgggatgcggcaagacggaagcgcttgcattacgaatccaaggacttcttcaccgcggcgatgtgactgccccaaagaagatcttggtgacaacattctcgaaccgagcccgcgacaacatcagagaacgattggggtcctacctgacgccttcggtaatgcgcgaccgcgttactgttgtgaactttcatggactggcagcccggttgatcagagcgcacggaaatgttatcggcctaagtgaggaactacgccttccggagaacgactgggttggcgagcaactccgccaacgcaacacctcctggaatgaccgaggagcgatccagaatgcgcttcgtgagacaaagcaacaacctttcagcgacgcagcggtcgaagctgaacttgaacgactcggaaatgtcactgcacttgaactggaacggctcagaaaggaagaaggacgcctcacctatgatgatctgccaagacttgccgagctgattctcggttacgagagcgtcgcggacctctacgcgacacacttcggcgctgtcgtggttgacgaattccaagacctgactccccagcaactccgaatcgtaaacagaatcggttacaagcgcacaacctatggcggtgaccttgtgcaggggatctatggttttgcaggagcgcagccactggcaattgatcgggacatacgtgccgagtgcacctgcgtgatcgagttctctgagtcgcatcgatcctcaccggcagttctcaggacggtcaacgcccttatcccgatcacgtcgggacaggtactcaccgcagccaaccccgactcctggccttcgggcgggctcaccgggacgatcgtgcaccaatcggcggaatcggaagctaagtgtatcgtgaaaattgcgcgagccatcctcggcagggctcccgggcatcggattggagtgttatcccgaacagcgccgcgtcgccgattcgttgacgcagccttcgccgcggcaacagatatacctcactacaggtgggatgacggcgtgttggacacagatactgccaaactcgtaaaggcaatgctcgcgaggtttgatgtcgccgcctacactgccgcgcccgacaaagtaactttccttcggatggcggttgactttgactcgatcactgatgtcgacacgcgcaagagcatggcggatgctctcggttgggtacaagatctgctgtctaaagcggtgaagccagagagcatccgtggacgcatcaaggttggcgattcagcgaccctcatcactagccctggagtccatctactgcgcggacacgtcggcaaagggcaacagttcgactgggtgattgtcgtaggccttgaaaagggctccattccgttcactatggctgacacatcagacgacgagatcgctgaggaagcacgagtgctttccgtgatgatctcacgcgctcggcacggcgtcattcttagccgagccaactcggttcggacgaacggggggcaccccatgagtcgaactccatcccagttcctcgaatggattgccactgccaatccactcgatgcgactgggatcatcgagtggttcaaagctgcggactggcgtgtaatcagtgagagatgaccaacgttctttggagagaagtgcgctgtccttgatgatgatccacctccgacccgcgcaaccttgggcgccggactcaccaggttgcagatcggatcagactggtaagcaagcgcccgtaaacctcgacttccctgaacacgggcccaggtcctattgaccccgttcagagagcacgagttcgtccagtcgcgctgcgcacccgatcccacgtcgtcagaaggtgagcggtagccagccagggtcatttacaaagcgctcagcgcgatctacagtagatagtaaggcaggttctcgtctcttgcgggtccatcgggacggcctacgggcgctcttccacgtactgtttcctcgacggagtagcacgtgtgacgagagagcccgatcatgttccgaaccatctggacgctcagcattcatgtcgatgactgtcttccagcactacatgccgagcaaccggctgctggcagctacgcgaactcggcgaggtgtgaagtggggtgtctcggcaatgctcgtcggcgtcccgtatctcgccatcgccaacgtgttcaactaccctgactgaccgttctgtggtgacgtgcaacggggtatcgatgttggtgtgcgcgaggacgttggttgtgggctcgttgtcgggtgcgtaggcggcgttctcgtcgttgtcaatagtgatgcgggtggatagggcacggttgaggattcgccgctcggctggcacgtacgttctcgactgtggccacggttagggcgaggtgtgctccaacggtgtcaacccctgggccaatgtgttgatgaggtcacggtgacgagtatgtggtcatggccgcacactccagattgatccggcaggcttccagggtggtgaacctcgttgaggggtccagctaagtacctaaggtcatggccaagcacgatcgcattcgctttgccgtgtgctctctttcggatcatcccggggagcacacaagatcgcccgaacaatggcgatcttgtgtacagtgactttgctagagatgttttcccaggaccgacagtgactgccagtgcgatgttcgaggtagtggtgaaactacgggtgtacaagatctgggtggccgtaaacgaggttgcctcttgggctcaggtcctgcctgacggaacccccctatctgagccctggccatgacgggtatgccttagtcaacgtggctgaagtgtcctgatatcgcagcatcagtgactagtttggtaactgtaatgccgccgcacccgttttacttactttcgatagaaagcgggtactctgtgcactttgcagggtttttgccttcgttgcttcccgtgcgacttactgtgtcttcttccttggggaggtgtaggggagggtagaatgttcgtggactagatcaacttaaccaacttacgggttgtaggttaacacctatctgtcaaccttgacactgtaatcccattgttcagcaggcacactgtcatacatctcactatctgtaaatgcagagcctgtggtttcaccaccaaagcctaactgccttaaatgtgcaatcccgttctgtgctccctccaaatcgatccgctccagtgtttcatcagcttcagaagcatagaggaacgtcacgctaacctacgatttggttctgggttgaatttttaggcgatctgatctgaagtttcgcgcgcctgcatagcccgatccgcaatctcgtccagcccgctgattatgtgatgcagctcacaagtagttagtaacaggacctgctccgcggcctggcctctatcggtgatcagcatgtgtccacggcatcttatccaccacgatgtcgcaatagttgcactgattctgacggcaccgccaacattcggtaagtgtaggataggacaagccttgagagtgtggatggaatgtgccaactctctcagtcctcaaagcatcagtggctagatcaacaaacatcgtaaacaggttgttctctcttatagcgatgtgtctatcgaagcagatgaacgagtcatctgccaggtatgaatgattgccatcactagtaacctctgcgtacggcagcaagacgttactgatgtttgagattaggagatccccaaaaatagatactcggagcgaaatagtatctatacctacgatgatgccgtgaacactactggtttctcaagcaaccagatccgcacatttaaaccatgtgaaacgtccggtaaacattctgctgtaagtcacccaggtgaccccttggagaaagttatttcagggctatggggctcgggggtgcgagaggattgttcgttgctcatttcggattatctttcagagatgagcaaccgcaatcggcattgaccagaagcgggtaaccggttgaccctagacagacttatgtttggtattcgtcaagcccccatcgggcgactggaacctgatcaattagatgatttgattgctattcttagaagaatagtttcctagattttatagcacttcccctaaacgtctaagtatgccctaaatcgtagctctaatgcagatgggcgggcgaggacgttccgggaagcatcgtcaagagtgtcgatgtcgcctgctctagctaagactcgctgcctaggaaaatcctgaacccaagtggctcggtatttgggggtgtagttcctggcgctatcggtgatgtccatagcagtcttggcggcggacgtgttcgttaagtcaataggactccagctggttttgtactcgtaatcttcaagatcaacatcgattcttagctcagtattgaggatctcgatcatgaaactcgaatcagagggaaaacttaactatcatatgcaatatcttcttaagaagagcgcttgccgactacgttatcaagcgatcccacgagcaccaatctggtatcggtaaaagtgttcgcttttctcggcggaaaatccccaaaatgcttggatatttttcttgacggatgaacttggagaagcgctgttctaatgcggcgtcacgccagacagtgtgcgcccggcatcgcccaagcctgagtgtccgaaacatgcttgatgcgtgtgaagcgttcctgcgaccaaggctcagcttgctggggatgctctaattacttctgctgctcgatagtatgcgtcctaggatagacgttgacttgagttgaggttgtctggctcttcgggcctgaggtggggcagctagtcggggcccggtgcggtgaggggtcggggttattcggcaggatcagcagcgcccaaactcgctgctccaagaagaccccgactgtgtgtgagcctaccaactactgccctcgttgtgatgccctaacctgcccggtctgtacgtgaccgacgtcgagcgcggacccgatacgattatggtgggggtgaagttagctccgggcgaggggttctgccccgactgcggtgtgctcgcgtctccccatggccgccgccgggtcctgcacgatgtttcttcggcagtatggcggtcgtgatcgggtggtgtacacgcacgtggcgctgcctcgaagccttgtgtagcaagggctctttcacggaacaagatcctgggatcgccgtactgtgggcggtgttgacccgccgtgccactcgatgggccgtggggcagctgcgccgagaacgcgtctcagtgctgggactcgcacgccaagctcagggcgactggaagactgtctggcgggcggtcaacccggtcttagaggaggcggacgctgacccagtccgctttgcggggatgcggcacctgggggggtgagcacgtctggcacgacaagaacccacgaacccggggaccgaagatgctcaccggcatagctgtcttcacgcacaccgacgacgtcccacgggcccggctgttagacctgaccctgggccgctccggaaccgtgtatggcgtctggctccagtaacgcggccaagcggtggcagcaggtcgagatcaccgcgttggacccgtttcgcgattacaagcacgctatcgatgatcacctcgataacgccacagccgtactgagtcccttccacgtcgtgaaacttgccgcccaggccctcgacgaggcccgacgccgggtccaacaagccccctcaggcaaccgcggccggactagcgacccgctctacggcattcagacgatcctgcgagccggggccgagaacctgtccgacaagcaaaaacaccgtcttgccaccgtgatcgacgctaacgaggcacacgagaaaatgttcattacctggcacaagcagcgtaacggctccgggccgtcaacagaccgatcgaactctaccgccgcatcgcccgtggctccagcaactgcgacaactaccgcctactccgctgctcatcgccgggggcaacacacacgaaccaccgccaagtcagacgagccatttatagcccaacagctatttgggtgatctcctcagcctgacagcgccagacgtcggtccgccatgctaagctgaacgcgtcgcttaagcttcgggaatagaaatgggaaacggtatgactcaaatacttattcaaatactcccggaatagacattcttgcggcgcgctccgctctaatcatttcgtggccgcctctcctacgacgaattgtgcattagggaagtacagtgcatctcagtccatatgtagtctttcgcaggacacgactcgcctactctcaacttcagagcagctccttcgacgcactctggcagcaagtgcaagaaatggtcgataagcatgcgcaattagaggttcagaccagcaggcttacggcacacctggagtctgttatttcagtaactgcgcctcgtgacagatctcgactaatcacattaaaacgtgacgtgcataacatgcgcgtggaaaaagtgaagcaaagactactgcactgtcagggctgcacggctagcaacattatggagcctgtatctagttggatcgatacatgtcgatcatacgaaatacttgagcgtcggttgagtcaagtatatgcggacagccgagacgaagtgtctcgtcactacaggtccctctaccaggctgacgcaatagagccaagcattcaactctcaggtggccagctccacagtgacctgacgcgtctgattagccacggttctaggataaaacccactaaagagcggactctggaaacgactcttgtaaactatctctacagggcagcaacaaagccatcacctttcggtcgtttcgtggaagtaggggccttcgacccgtctcaaccaaattccgaacctcgacgctgcagtgaatccagcgtgacgacaaaccggattcttaccagctggctcactgcagtaacagcgcgttctttcgccgcaccagaaatgcttgctatcctcaacagcaccctgcgcgttaaacgcgatataatccagttcattggaattccacctggggagtggcgaggtgcaccgagcattcccgaggagcgcctgctaactatccgcaagcgcgaagatatgatgtctgttcttaagctcctaatgggcggcccaagatcagtcggtgacctcattattgcccttaatgaccaaggcatagatgaatcacacgcaactaatcttctcagcagtttgagtacagcagggataatcttctttcggctcccagtagatgaccatgacgtacactatgtacagactgcgtgtacagcgctaaggttaaccaaagatgagtcacttcgtgccgctttccaaagtctggcgaacgctgaaaaggagttccccacagcgtcagtcgccacgcgtcacgaccttctcctcagcatcaaggattccgtgaatactgtcgcgtcggcacatgatgtgccggccccaccggacagcgtactcaagagccctttgtatgaggacctccccgccaccgcggcaccccagacatgggattcgaacacggttgagagatcagcccgcgcactcaggagcatctggctactgggcgatttaatggatagctctcaacgccgacagttgggcctctcccagttcatagcagacatgaataatggcgcgccagttacttttctggatttcttcgactcgttttcgcgccttagcattcgtgagcgccaaggaatcctgcgcggagaaaactcaccgcaaatcgcccgtttcgctcagcaatatagtgaagcattgcttaaaattcgcgatgccgttaactacacgcaggacgaagcccaccttgaatctcaggtaattctcgatgcgatcaccaatattgatgatttccgaccgactaagtcggtcacaattcgaggacaattcacaacatcgctcacctcccatataagccaactgataatcaacggtgttatgacgggatacggtacatacatgtcccgattcgcaacatttgtaaacccatcaggtacttggagtctagtcgacgggattcggagacatctatccgatcattttccaggtcaatgtgatttgaattccgtactgggattcaacttcaatgttcatccgcaaatgacagcacatagtatcgcctatcctggagtagttcctgtgcttaatggtgccaagacacattcgattcaggatttaatactgattccaactgctgaagcaggtccgcgccgcgtcgctatctttgatagagcagagaacgaacttatcgacctccagcccatgaatttcatggttccttttggggtgcctttgctgtatcggactctagagttcctgtgcccatcgaccagatacctatggaacccagctcaagaccttctggatatcccaatgatagagaacagttgccctcggatttactttgacgacgtagtggctcaacgccgttcctggacgtgcagcgccgagacgctcccgtgtcccccagagaaactctttaggggtgatcttgctgctttgcaagccttcgactcgtggagactatcagcgagggtacccagacatgtctttgccctagtacaaacggctacggaaagacaaattttttccggagcggccgacgcgccaaccttgctctccgaatacaagcatcttcggagagcaagtgtgcataagccaatctacctggatctacgaaacccacttctagtccgttctctcgcgaaggtgatcatgtccaggcccgaactatatgtcacgttttccgagttcctcccatcggaggccgattacacgcagaacggaagctgccccagttacgcagaggagtacttcattgaactgtgtgccgagtgacagcgcaagcatgtctgatcctggcggctggcgggcgctccatattcacttgcctccctcggtgcagtccgagtacctagctgacgtgattcttccctcgatgtcagccttgatgccagaacatgactacttcttcctccgatattggcaggggggatcacatctccggcttcggctccgtagcactcccgagcgccccctagatgatgaggctatcaacgaggttgcatgccatctccgtagccttctcccggcgttgtcagaccaaaagcgcgcggagtaccgctattcgcaatcgcttcaggatcagttagccgaaatggaaagggctgattgccttcccctagaggcggttgggaccgtggtagagcgccggtaccagcctgaatatagaaagtatggcggatcggtcggagtatccattgcagaggatgttttctgtagtactagccgatctgtccttcgcattctaagtgagcgaccaactagccaccgacagcccttggggtatgcttgccaagttttcatccagatgctgggctgcttagggctcgcaacttcgcaggttgaccagttcctcaccagatatgcgcagtggtggaccccttactcaatggccgctcgccctgagatcttagcggcgcgtctctacgccaacttgtcaagcgtggtggcggacctatgggccgcaagtgagcccaacggaatgttctcggttccggctctcaatgcttatacccaatggtcacggcgacggtcgtccgcgagaaataccagcgtaaagatagacccaatgtttctatcttgcttagcgaactacattcacacaaccaataaccgacttgggctcccacccgccctagaatcgacagcggcatatcttgtccaacttggattccgatcggtggctgtcaggggggagaaagtgcgatgaatccaaaaaactccaaagtgacggaactttggtttccagataattcagactcgccatgtactcttcttctcgacttatctcgggcctccgctgagggcactgagcctagtcctcaatactactgtcgaacttgggacccaacaacaaaagatcccggagtaagggttggcatacttgatcccaaccgcttaactcatcaaacggctttccttggcggttccggtattacgcatcacttcttggtaatggaaaaaccacccagctggcctcttctatggaacgcgggtttcgcgggcttgaagctttccacgataagcaaacaattgttcaccgcgtcatatccatggatggtaaagtgggcgctacaggcatcggcttggacggacgacgaacgccttctggctcttacgaaacttctagttgcccacgctgatgcaagccttccaccggtcgataagactgaaatgctcggccgcctccctttgaagttgagcttgcgactgatcacatatcgttcccactacgaaagcatccgcgctcgcacgattgacccgaaagcgatggatactgcggttaatcgggccttcatgaagtatcaagacgagctcctgcgatggtcccagtcgttgacatgctcgtcgagctatcgtgagaaagaatggagtaatcccaacctttcagaatggagcgccatcatttattgccatctcccacaaattaggcaactcctcagcgggggaggattaactgtcgcgggcccgacacgcgaggatatagaagcctccttaggtcacagtattcctgatacacgatttcacgagcgtcttgaccccgccatgcagtattatctcaatcatgaccaagacttcacggcatacagattctgcacgggttttttgtacagcaacctgtactcgctaggaataccgttgaggctgcgctaccttgtctgtgggttggcagcacgtttcaacgaggagctgtcggacacgacttggcgcgatttacgggatctcttccacgaggctgctactgttgcatattacacacgcgacacagacgggagcgggattagataatgacagttgagcgtcagcctctgcgggagcgtgcaaggagcctcgtttcaccatacggactagtttcccaagtacaccctctgcacgccaatgaagcagatccaccgtttcatgtgcatttgggtcgaacaggccactcaatacacgaggggcaaattacttttgagggagatatcggaaacaccgacggggcagggtcgggatccgacagtaccacggcagaatttattgcagtaatggagtccttagagcgctactccagcgcaatgtgggacgctcgttcctttttgctggaatcggaaaataatctgcaggagcgacttgtatctcccaaccaattcccacgctgttctacagccgagctagattctggacatgtactcaggcggtacgacccgggcgtcccaatacgatgggtcagaggatggtcactgacttcaggtcatcaggtgtgggttccggcgatcgcggtttatctgcatctgccgtacttaaacgactctgaacgattcatacgttcagtctcgaccggatgtgcggttcatgaatccatgcggaaggctgttcttaacggtcttttagaagtcgtcgagcgagatgctattgctttgacttggttgcatgagttgcccttgcccagaatcgcggctagcgaggccggtgagttcccgccggaagcgctagccagttggaagtcatatagggattacggaatcgagacccatctctttgacgcaacgacggattttgggattccggtgatctttgcgctccagatatcggatcaggatgacgacatcgctcagctcgtaggcgctgcatccgctttggaacccgctgaggcgctgactaaagtattcagggaaatggcatcgatccgaatagcactacgcgcctttctcgcccagtccacatcgattaagatttaccccgatgtggctaacgtgacagggggtgccgccctcatgggccagcgcgcgtaccgagatgcattttccttcctccttaacagcgagcgcgaaacgtcaccgtcgcggatgcctaacctcctagagctgaatgatgatccactgcgcgagatgattattcgaatacgcctggctggcgctgaagttatcgccgtcgatatcacgacggacaaagcgaggtcagttggtgcaagagtagtgaaggttttggtcccagaggcggttccactctcctttgttcaccgagagaggtatttagatactcctcggctcatatccgcgcctaatagcatgggatatttggttgacacagcgcctacgttcaaccggaacattcaaccttttgcgtgaaactcatatcaaggaaggccagaccgactaatggaccgcttcgttgtgactcggacgctcttcggcgtggagctcgctaaagaactccagtcctccatcttagaggatgggccatacataggcgactcagttcctcactggaaacaaaatcaattactcgtgtacgtgacgacagatgaggcatccccaaggttggactcaattgacggcggggcgttctcagctggccggccttggctccccgtccgtcttcgacccacagtgattcactgcggccccataatttggccaggtagtacgccttgcttccggtgcagtgtgaaccgaatgaagcagcactctcccatgcctagtctcgtaggttcaggaccggagcttgtggaaggctatgcggcgtttcatgtcagacttatagcggcagcgatctcgttgctggaggagagattctctgagggggagatcttaggtaggggcttatcatttaatcttgtcaacgggtttcttaaccactatcctatcgtgcccgttgatcgctgtccgagatgcggtggccgtttcggtaaacgggaagatgagcaccaagagttgggctgcgtcgcacgggaggtgtgtcaagtatgaagggtataatcagtggtgaacaggtgggaaatgcagctcgctttgacaagcagttcagggtccctcgtcggccgagcaggcggctcggtgtcgatattgagatccgtgaggatgcaacaattctttggggatcagatcgtctgcagacatttacaggaggaatgaaaccttcactgattgaggatattttacgagcgtgcgacggaactaagacggcacgtgagctcgcctctgtatgtgatgttacggagcccttgatggacaagatagtggcccttctctgggtctcgggtgctattgaggaggcgggcccgaccgatgttgaaagttctccgcttggggtccttttgtctcgccttgggaacgcaactggggcgaatgctagctggcaggaagctcagcacagaattaacagcatgccgatctgtgttatgccccattcggaacttggaacggaggttgcgggcgcgcttgctggcacctttgaggttatcaatgaagaggcagcttttgaacgcggcgtggttctattcatctttatcgaaaccgcgtcgtctaagatcgaacagcatcacaaatttgatgaactgacaaagagaagagtgctattggttagcgctgcgggtgacgaagttgtagtggggccgctttatgaccaggctataacgccctgccttcggtgctgttcgtcatcgaggatcaagctggatcggggtgcctcgagcccggcgcagcttcgtctcatggctggaattgtctcgcatcatattgttgcgttggtaagcagggcgttactctcaccgctgcccacggattccttggcgctgaatgtggtcactggtgtccagcgctactctcccccggtgtccagaccgggttgccccgaatgttcgcatgcgatcccagctattgctagtgagccgacggtcggtgccgtgtacgaggcttccgtagcactccctccgcgagaattcgtgaatgtaagggactatcaagcccacttcttgagcgcaaatcaacaacttcaaacgaaatttaagtcatggggaaaaagggaaaaattccctttgcctgacattaatatttcagacctacatatacagattgacgaccttctttttttagctgctgcccttaggtttgggttcggaatagacccggagcggaccacttcaaaaatagcgaagcgctggacggcctctggtggaaacattggctcggtaaacgcattcgtgagccttcctgcgatggtagggcacattcccagtgggatttatggatattcagttagcgatcattccctagccaaagttagtcaggagttgatttcggcgactgacatcatgatcgcggcttctgccgacctacggaagatcgcttctaaatatgggacattcggcttgaggatcgcgattatggacgccgggtgtgccctttcaacggtgcgtcgtgtctgccgggaagtaggccgtacattttcgatgtggagcgctgacctcgacgctgggtctattagcgagatgctgcatctttcaagtgcgcgtgagcctattattggagtttcagtgctgggaaaggggcaacgagggtgaggacagacattcccgtaatgaatgccattctgtgtggaatttctggtttgaggccgagagttgcggagctccggctgaatcatgtaccaggagaacttgaaggtgacctgatcggcgagttctcggggccagttactccggatgaaggatcaccttgtctgccgtgcaagagcttccccgaattcttgcagacaaggaggtcggtatcccattttagagacgaggcggttgacgcacgctgcgtcatccatgcagtggctcaggctcttgaggatgatgagcgactgtgggggtgctcagagaccgctggtcttcttgaggcgtttgtctttgtgcttcgagatagtgttggcggtcctggaccggggatctatcaggtgcggcgcgattctgcggtgagaatgacaactgccgctgaacttggcgatccgattcgattcggtgttcaggaggaattcttcgcagggtcaggggtagttatcttttgcgcgaatctggacgtggaggatggcgccggaggagcaaacggatacttagttaatactctccgagcttccatggcactctacgaagtccatgttgaactcggttgcatggacgtggttggctccgttttcggaggcttcattccagcttcgctgcgatcgctcctgttggcagatatggttactcgtcagcaaatcatctcttgctcctatggttttccagcctaacttgctcgacccgccagtagctgggttgtgaattgggtaatgaatggatcgaaataatttgtaccatctgagtcgcgagaaggtaaatacaaatgaaaatgaggcacttaatctcaatgtgatggagttctcggacatgattagcgacgctactgagcgcgacgacgtcactcagataatggcggcatcttgcgtcgagacgagtgtatcgtcgagttccacgtcatcttcatgatcgccaagtggcagattatggagccaggagaagaggtccgtacagggcgaatactcagacgcgacttagccttcgcagttgtcgtggaagtttatctagccgtcttaggttgtttcagcaaccctacacgggaagatactcttagcgctctggggtgggattatttggttcgccaaagcgattcaaggcttcctctctaggcggttatgattagtgtcgaaaccaattgaggggaggtgaacagaatggagaacgaaacgttggaccttgacgtgatggagctggccgatatcatcggtagtgcttctgatcaagacgacatggctcaggtcatggctgcgtcgtgcaccaccacgagtgtctcgacgagctcttcgtcgtcctcgtaacgagatgggcgggctggcgggtgcttttcgggcccgccggcccgttcctttgttatttacggttctttgcttgagcgggctgaatcgtggtggggaggttgtctaaaatttgggctcgggctcgaggccggccgcgtaaattgaccacaatgagcgtgctgcggtaacttagacgtaagatacgcttctcctgctagccttatttgttacccgtttggatttcacctagatgcacgctagggtaggctgattagcttttatggaaatgatattattattatgataattagtgtagatgggatttggaggggcatcgtgtagctagtctcaaatagaagcgatcccgcagtgcagcgtattttggatatgtccaggccttcgttcaagctggtttgatgtttttaaaggatgtggtgaccgttcacattgcgcatggctgccggtgtgcacattgttgagatgtattcggaggctggaaaggcagcggctttttcaattgacgcgtatgcaaccctgggggttccatatcgagaaatgtcatcattgttgttgtcgtaagtattcaaggtgggtaagcgccctgagattttcgctgttgatcgggtggcgcatgaggctaatgccggcgtaattgatccgaagctagatttggttgttttgaacagtttgcacaccgtcggtaatatgggggcgataatttagacctcctttgtgcttggctcaagggcttttgttctagtggacagaaacttgagctctatttccgataggagggttcttctggcttctcctagatacgtctttcttcttctggttctgagagctagtcgcgatgagcttcttgagttgtgcaccagtcgtcgggaactggtgaaattcttggcggatggctatgtggatatggcctttttctggtcttgagaccatccgatcacgatggtctagggaagcaaggataagggtgtgtcgataatttgattatcggatttccatctccgttagaattctgatgctggcggatgctaagtcattgaatgatgtgtctgtggcggtcggaattggactacatgagaggccgcagcgtgacttggagagcggatcttaggaatcagttcagggccaggactcccatccaggccatcagtttgttggcgaagctgacgatcagctgcccgatccagttctgtgtgaagccttttcaacgacagatcggtcaggctggtgtccttcgctgtcagggtcaggtctaacagccgggcccgtgggacgtcgtcggtgtgcgtgaagacagctatgccggtgagcatcttcggtccccgggttcgtgggttcttgtcgtgccagacgtgctcacccccccaggtgccgcatccccgcaaagcggactgggtcagcgtccgcctcctctaagaccgggttgaccgcccgccagacagtcttccagtcgccctgagcttggcgtgcgagtcccagcactgagacgcgttctcggcgcagctgccccacggcccatcgagtggcacggcgggtcaacaccgcccacagtacggcgatcccaggatcttgttccgtgaaagagcccttgctacacaaggcttcgaggcagcgccacgtgcgtgtacaccacccgatcacgaccgccatactgccgaagaaacatcgtgcaggacccggcggcggccatggggagacgcgagcacaccgcagtcggggcagaacccctcgcccggagctaacttcacccccaccataatcgtatcgggtccgcgctcgacgtcggtcacgtacagaccgggcaggttagggcatcacaacgagggcagtagttggtaggctcacacacagtcggggtcttcttggagcagcgagtttgggcgctgctgatcctgccgaataaccccgacccctcaccgcaccgggccccgactagctgccccacctcaggcccgaagagccagacaactcttgttgagcttcaaagccatgaaatcttcggtctgcttcttaatgccagtctctgccgggaatcgctcgatggaagatgcgccgtagaagcctacgatgccatcggtgtgatcgagaatgtattgcgcatcctcgggattggcgatggggccgccatggcataggcataggatgtcgggattgacggatttggcggcgtcggcgagttcctgaaccttgacagcagcatcctcgatagtgagtgctgtttttgcaccaatggttccggaggttgtcagacccatgtgggggacgaggatgtcagagcccgcccgggccatatccttggcctggtcaacgtcgaaaacatagggtgaggtgaggagatcaagatcgtgggcaattttgatcatgtcgatctccaaaccgtaccccatgccagtttcctcgaggtttgcgcggaatgtgccatcgatgagaccaacagtagggaaattctgcactccggcgaaccccgcggctttgatctgggttaggactggggcatcactctgaagggatcagtgccattaactccggcaagaactggggtgtgcttgacgacgggcagtacctcgcgcgccatgtccatggcgatctcattggcatcgccgtaagcgagaagccctgagagggagccgcgacctgccatccggaaacgtcctgagttatagatgacgagcagatcgataccgccggcttccgcggatttaaccgtaatcccggtgcctgcgccgccgcccaccaaggggattccgttggcgacttgtccgcggaactttttcaggatttcagtgcgggtcatgatgctattcctttccgattagttatggatgatgagctcgtgaagagcccgcgccattgcttcgccaaaaccagaatcattgatattttgttttcgctcagtcacagtgatgtcggtatcctttattccctctcgaatggcgttgaacaaagcgtcatcggcttctggatcatagaaatcttcacctggggtatctattcctgcgacccccagagtaggaatgaaagcttgagccgggccgcgcgcagcggccgcctttatggcgattctgtgaccaagctcggccatttcggtgttgctcgtttgagcgtcaccgctggattgtggatatgcaacgtgcgagaggaatagcgctccggaatagtgtcgacagggccgaaattgaccatgtcaagcgcgccaagactgatgacttcgggtattccaaggtctgctgcggcttccatccggcggggtcctgccgagagaactcctccgcagaggtcgtcggcaagctcggtagtcgtcaggtcacatattcccgcgagtagcccagacgatgcgagcttttctatcgccttcccctcccggaatcagttgcgtggaagacgaggacctcgtacccaaggtctgtcaaggtcttgcgagcttcgtcagcagccggcgttgtcaatccgaacatcgtcaggccgacgaccggtttgttgtgagcggggttgctgacggttctaacgtcttcatactccttggccatggctgtgatagcggcggctgcattggcgaagaccatgagcgacacggaattgatgccggccacgtcaacgacggagtacataagtgtgacgtcggtttgtcccacgtaggggctgacatctccggaagccatcgtggaaaccaggagcttggggaatccaatcggcaatgtctgcatgaccgaagccgctacggatgatccacctgatccgccgagggacaggagaccgtggattttcccctcttcggcaagcttggatgcaataatcgaagcgccacggcccatgacatccatcatttcgccacggttatgacgtgttcggatgtcacttggcgactcgcctgcggcacgaatgacctcatcggacgtgtagtcggctatacggctgttggagaatgagccaacatcgatgatgactacctggctgccgttggtaagaatgcggtgacgaagccagtcgaactcgtctcccttggtatccaaagttccgagcaaagctattgcggccatgaacactccttcgtgatcgtgtcatcatgaccgtagttcggtgattctgcctacaccatgccgtttgagacgaattggcctgtacgttgtatcgctggttgtgaagaagggcaatacttcaggtgtggttgtcaaggttgaccctgcaagtctgagccggatgctgggggagtggagccagcccggagaagcgcttccggaagcgttggcggacgcattgctggatctcattgacgctggttttgtgcccgctggtgcggttcttccaccccaacgagcatgcgccgcgacactgcaagtatctcggcaaaccgtggcggaggcatttgggattcttgaagccgcaggccacattgcggcgttggttgggtcagggacgcgggttagatcaggccgcgctgcagtgagtactgatggcaggttgttctcgttcagcgaggctgcacctggcctgatcgacctgtcaacgggggcgctacctgcgtcagaggtggtgcgaagagtgcggctagaagaccacgtcgacttggatgagtatttcgataccgacggatatttcccggctggactacctatattgcgtgcagccatcgcggaacggctcactcgagatggagttcccacagtcccgcagcagatcgttgttaccaacggcgctcagcatgcgagttatcttgcctctcagctcctggtctcggctggtgacaccgtgttggtggaggagccgacatatcggggtgagctcgcagagctgcgactgatgggcgcccgtgtgaagagtgtccc

SEQ ID NO: 56 - DNA, 26003 bp, Propionibacterium acnes
  source 1..26003: mol_type = genomic DNA
cccgctcactgccaacgagacatcacgcagcagcggccgaccatcggccagcgtgtacgtcaccgacgcgacatcgagacgaaccatgacccaaaagtatcacacgtgtgataaatggaggttgagtatggcggcctgttcacttgatcaggcatttcttttagtgaggcctggggcgtaaccacttgtctgcaccttagagctgccacgcctcttgcagatcgaggcagaggaggctgcgcgggggtcgtggcgtgcggtggcggggtttgatgtcacgttcagtgtgccgaagtcggcatcggtgttgtgggcggttgcggacgcggggacgcaggcgttgattgcgcaggcccatcatgagacggttgtggcggtggttgcattcatggagtgcgaggttgcagccatccgcacgggtgcaactgctggggatggcgcggttgcacaggtcgacgtgacgggtttgatcacttcgattcccgcgccggggacccgcacttgcatacgcatgtggtgatcagcaacaaggcccgcacggtcctggatgggaagtggcggagtttggatgggcgttcgatgcatgccgcggtcttggcgctgtcggagctgcacgaggccgtgttcgccgatcacatgacccgcacgttcggtgtgacgtaggagccgcgggagatgggccaggaccggaacccgtcgtgggcgatcaccgacgtccccgaacagctggtggcagagttctcgacccgcgcccggcacatcaacgaggcgaccgacgcgctggttgctgactacgtggcccagcacgggaagcgcccttcgccggcgaccatcatgaaactgcgcgcccaggccacgctcgcgacccgtccggagaagcaggtccgctcacttgcggagctaacagccgagtggcgcactcgtgtcagccagcagctcggtgtggatgccaccgtgtgggcgcggaccgtcacgggtggggagcggcagttgctgttgcgggctggtgatgtgccgttggatctgatcgaggggtggggcggtctgtagtcgagatggtcggtgagaagcgttcgacgtggcggtgctggaacctgatggccgaagtcgcctgccagactgtggggtggcgtttcgccaccgttgaggaccgcgaagtcatcaccgcgatggttgccgacgcagcggaacaggcgtccttacgcctgaccccacccgagctagcgaccagcccggcgaagttccgccgcccggacggcactagcgtatttcgtccgaagcactccacggtgttctcctccgacagcctcctggccgcagaggaccacctcctgcaacgggcccgcaccgcgaccggtccgactatcgacctgaccaccgtggggaccatcacgagcaaggcggacagcgagggtcgggtgctcggtcccgatcaggccgcagctttggcgtcggtcgcggtcccgggccgggtggtggatgtgttggtggggccggcgggggctgggaagactgcagcgatgaacgcaccgcgccgggcgtgggagacggagcatggtgccgggtcggtggtggggttggctccgtcggcggtggcggcccaggtgctggccgatgatctgaggattgccacggagaacacggcgaagtggtggaccacccaccaacacaccggcgtcactttcaaggctggtcagctggtcatcatcgacgaagcttccctcgctgagaccctctctttgaatcggatcacgctggctgctgaggaggcggggacgaaggtgctgctggttggcgactatgcccagctcccgtccgtcgatgccggtggtgcgttcagcctgttgatccacgaccgccacgatgcccccgagctggtcgatgtccaccgcttcacccacgcctgggagaagaccgcatccctggagctgcggcacggccgcaccccggtcatcgacacctacctggcacaggatcgcatccacgacggagacgccgaggccgtgaccgctgccgcttacaccgcctggcgccacgaccggcagcaggggttggcgtcagtactgatcgccgaaacccgcgagaacgtcaccgccctcaacatccacacccgcgctgacctcatcctggacagcacgttgaagcctggccccgaaatcaccctgtccgacgggtccatggcaggcgtgggtgacacgatcatcacccgccgtaacgaccggcggctgcggaaccggcacggctgggtccacaacggccaaacctggaccatcactgccgtgcgtgacgatgggtcggtcacgatccgcccacccagtgcccggttcggcaacagcatcgtcctacccgccgactacgtggctgagcacgtcgacctcggctacgccgtcaccgctcaccgcgcccaaagcatcacaccgacaccgcccacgtcctcgtcgaacccacggcgacgcgggaaacctgtatgtggctatgacgcgcgggcgcgaatcgaaccgggcctacgtcatcctcgaccgtgccgacgaccacgccgccggcgccgtgtgccgtgtgaactcggtcgacagccccggacgctgggtcgcgcggtccgtgatgagttcgtcgacgtcggcagcggaggtaaccaggcgtgcgtggccggtacggagcagctcgtgcgcaccacggctggtgacaggccccggcaccgcaccgacctggcgtccgagctggtgggcctcggacgctacccgaagcgcccccgatcgcgcgccggcctcaacgaccaccgttgctgctgacattgcctccaagcagtcgggagcgggctaggagccgatgccgcgtcgacacggatccgggaggaagctcgctggtcagcgcactcacatcacccacccggtccagcaagtcacggtggccgctcgggtcggggcggttcacgccaccgccaacaccgcacggtgcacagcagcctcgacaccattaagcgtcaccagccaccagtacacgctcacggttcgcgaggtcgccagccagctcggcggcgacatgctccccatacgcggaagccgcccgagaacccgtgaccgtcaccagatcgttccacggtcgcgccaagaacgacgccgcgccccgcacgaacagaataaacggagcgcggtcgcccagatcatccagcgcctgtggccagtgcgcgtcacccggaatcagagtggcgatcccgctctcctcgaccatgcgcagccgctgggcgagcccatccagcctgcccggtgaggtgaggtggtcacgccacacctgaccatcaactcgactcagaccaggcacggtggtcgtgtcggtgtcaagcagcccgagcgtctcaacggcacccaggcggcgcatcagcccgcccgtgacgggatcatcaggctccgccaacagcgccagcaccacccgggcacgacgttcatcaacaccaagcccagcaacaccagacatgacggctcctcctcgaacagacttcgccgaacaggtgcgccaacgcagcccgcaggtgtcgcgacgtcctcagcccgtggaggctggcgaacgcggtaacattcgacagtcgcacggttcggcagctcgacacagcagcgtgctggtgttgctttggaggagtccacgggcctcgccccccacaacggtgacttcaatcgacattgtcgttgttggtgatcgaggtgtcaccgcagctgcgaacgatagtcttgatctggacaacgatttcgatgcggaggaaagcacatgaggctcacacgcttcaaggtcgagaaccataggcggttggccgacctcgacattgaggtgcgcgaccaccttgtgctggttggagccaacgacgttgggaagtcctcgctgctccggtgcctcgatttgctgctcggggcgagtacggcgcagctctactcccgtatttcggccgacgatttccgagcccccgaccaaccgttcgtgattgaagggactctcgcggacttcaccgatgtcgacaaggctctgtttcccgatgagatccacgtcgacccgaacacgaatccttcgcgtctggtgattaggctcacggcgactgtggatgagaacgagacggtggtgatcagtcgttcggcccccgagggcggaacaggacgccagctctcacgggatcaggtgcttggcctgggatggaagttcctcagcgcaaccgcccagacccgcgaccttcgggaagaccgaaagtcggcactcgacgacatccttcaagctgtcgacttgggtgaagaggaggccgcgttcgaagccatcgcaaagagcctgacgaccaccttgggtagctctaaggtgcttgaaggcctccgaggttcacttgctgaccagctgtcgaaggctctgccggacaaggtggcacaggatgacttggcgttcgtgcctggagctgctgccgacaatgacgtcctcagcgacgtgcggctgcaagtcagcaagcaaggcgtggcacccgatctttccgaacagtcagacggcacgcgagcgctctacgcgatcgccctctacgatctgatgagcgtcggcgctaacatggtggggattgacgagcccgagatccatctacacccgagcagtcagcgaagcctcgcgcgcctcctgcggtcgaacgccaaccagaaggtcatcgctacgcattctgccgacatcgtaggagccttcgatccagattctattgtcgttgtgcggggcggaggcgaagccgttcaacccaaggctggattcctgtcggacgatgagcgaatggcagtacgcctgtgggtgagggatcggctcgaaccactcactgcacgtcgtgtcgttgtcgtggaaggcatctcagatcggatcatcctggagcacctggccgacctcaccgaccgaaatctcgaccggctcggcgtgtccttgattgaggctggcgggtgtggcgacatggggccgctcgacaagctctttggtgccaatggcttccgtgtatccatgtcgcaactcatcgatgcagatgcagaagaggcattggcaaagaaactgggagtcgaagttgctgaccttgcaggccgatccgtctgggtctcgcgaagcgacctcgaagacgagtacgttcgtgcgctcggctcggacgccgtgtggacagcactccagtcaaatggccacttctcgaagaatgaacttggcaactgcgcagcaagtgggccggctggcacgcgtaccgagatagatgttgctgccttctgtcgacgaaaggcgtacaaagtaaatgccgcgctatcagtcctgccgctcttcacggcggcgaatgccacgcaggtgtcgtctatcgagagtctactcgaagagatcgtggcgtagatggtcagcccgactcagaagcagattgacattagggacacgcgggttctcgatcttcttgtcgttgctcctgcgggatgcggcaagacggaagcgcttgcattacgaatccaaggacttcttcaccgcggcgatgtgactgccccaaagaagatcttggtgacaacattctcgaaccgagcccgcgacaacatcagagaacgattggggtcctacctgacgccttcggtaatgcgcgaccgcgttactgttgtgaactttcatggactggcagcccggttgatcagagcgcacggaaatgttatcggcctaagtgaggaactacgccttccggagaacgactgggttggcgagcaactccgccaacgcaacacctcctggaatgaccgaggagcgatccagaatgcgcttcgtgagacaaagcaacaacctttcagcgacgcagcggtcgaagctgaacttgaacgactcggaaatgtcactgcacttgaactggaacggctcagaaaggaagaaggacgcctcacctatgatgatctgccaagacttgccgagctgattctcggttacgagagcgtcgcggacctctacgcgacacacttcggcgctgtcgtggttgacgaattccaagacctgactccccagcaactccgaatcgtaaacagaatcggttacaagcgcacaacctatggcggtgaccttgtgcaggggatctatggttttgcaggagcgcagccactggcaattgatcgggacatacgtgccgagtgcacctgcgtgatcgagttctctgagtcgcatcgatcctcaccggcagttctcaggacggtcaacgcccttatcccgatcacgtcgggacaggtactcaccgcagccaaccccgactcctggccttcgggcgggctcaccgggacgatcgtgcaccaatcggcggaatcggaagctaagtgtatcgtgaaaattgcgcgagccatcctcggcagggctcccgggcatcggattggagtgttatcccgaacagcgccgcgtcgccgattcgttgacgcagccttcgccgcggcaacagatatacctcactacaggtgggatgacggcgtgttggacacagatactgccaaactcgtaaaggcaatgctcgcgaggtttgatgtcgccgcctacactgccgcgcccgacaaagtaactttccttcggatggcggttgactttgactcgatcactgatgtcgacacgcgcaagagcatggcggatgctctcggttgggtacaagatctgctgtctaaagcggtgaagccagagagcatccgtggacgcatcaaggttggcgattcagcgaccctcatcactagccctggagtccatctactgcgcggacacgtcggcaaagggcaacagttcgactgggtgattgtcgtaggccttgaaaagggctccattccgttcactatggctgacacatcagacgacgagatcgctgaggaagcacgagtgctttccgtgatgatctcacgcgctcggcacggcgtcattcttagccgagccaactcggttcggacgaacggggggcaccccatgagtcgaactccatcccagttcctcgaatggattgccactgccaatccactcgatgcgactgggatcatcgagtggttcaaagctgcggactggcgtgtaatcagtgagagatgaccaacgttctttggagagaagtgcgctgtccttgatgatgatccacctccgacccgcgcaaccttgggcgccggactcaccaggttgcagatcggatcagactggtaagcaagcgcccgtaaacctcgacttccctgaacacgggcccaggtcctattgaccccgttcagagagcacgagttcgtccagtcgcgctgcgcacccgatcccacgtcgtcagaaggtgagcggtagccagccagggtcatttacaaagcgctcagcgcgatctacagtagatagtaaggcaggttctcgtctcttgcgggtccatcgggacggcctacgggcgctcttccacgtactgtttcctcgacggagtagcacgtgtgacgagagagcccgatcatgttccgaaccatctggacgctcagcattcatgtcgatgactgtcttccagcactacatgccgagcaaccggctgctggcagctacgcgaactcggcgaggtgtgaagtggggtgtctcggcaatgctcgtcggcgtcccgtatctcgccatcgccaacgtgttcaactaccctgactgaccgttctgtggtgacgtgcaacggggtatcgatgttggtgtgcgcgaggacgttggttgtgggctcgttgtcgggtgcgtaggcggcgttctcgtcgttgtcaatagtgatgcgggtggatagggcacggttgaggattcgccgctcggctggcacgtacgttctcgactgtggccacggttagggcgaggtgtgctccaacggtgtcaacccctgggccaatgtgttgatgaggtcacggtgacgagtatgtggtcatggccgcacactccagattgatccggcaggcttccagggtggtgaacctcgttgaggggtccagctaagtacctaaggtcatggccaagcacgatcgcattcgctttgccgtgtgctctctttcggatcatcccggggagcacacaagatcgcccgaacaatggcgatcttgtgtacagtgactttgctagagatgttttcccaggaccgacagtgactgccagtgcgatgttcgaggtagtggtgaaactacgggtgtacaagatctgggtggccgtaaacgaggttgcctcttgggctcaggtcctgcctgacggaacccccctatctgagccctggccatgacgggtatgccttagtcaacgtggctgaagtgtcctgatatcgcagcatcagtgactagtttggtaactgtaatgccgccgcacccgttttacttactttcgatagaaagcgggtactctgtgcactttgcagggtttttgccttcgttgcttcccgtgcgacttactgtgtcttcttccttggggaggtgtaggggagggtagaatgttcgtggactagatcaacttaaccaacttacgggttgtaggttaacacctatctgtcaaccttgacactgtaatcccattgttcagcaggcacactgtcatacatctcactatctgtaaatgcagagcctgtggtttcaccaccaaagcctaactgccttaaatgtgcaatcccgttctgtgctccctccaaatcgatccgctccagtgtttcatcagcttcagaagcatagaggaacgtcacgctaacctacgatttggttctgggttgaatttttaggcgatctgatctgaagtttcgcgcgcctgcatagcccgatccgcaatctcgtccagcccgctgattatgtgatgcagctcacaagtagttagtaacaggacctgctccgcggcctggcctctatcggtgatcagcatgtgtccacggcatcttatccaccacgatgtcgcaatagttgcactgattctgacggcaccgccaacattcggtaagtgtaggataggacaagccttgagagtgtggatggaatgtgccaactctctcagtcctcaaagcatcagtggctagatcaacaaacatcgtaaacaggttgttctctcttatagcgatgtgtctatcgaagcagatgaacgagtcatctgccaggtatgaatgattgccatcactagtaacctctgcgtacggcagcaagacgttactgatgtttgagattaggagatccccaaaaatagatactcggagcgaaatagtatctatacctacgatgatgccgtgaacactactggtttctcaagcaaccagatccgcacatttaaaccatgtgaaacgtccggtaaacattctgctgtaagtcacccaggtgaccccttggagaaagttatttcagggctatggggctcgggggtgcgagaggattgttcgttgctcatttcggattatctttcagagatgagcaaccgcaatcggcattgaccagaagcgggtaaccggttgaccctagacagacttatgtttggtattcgtcaagcccccatcgggcgactggaacctgatcaattagatgatttgattgctattcttagaagaatagtttcctagattttatagcacttcccctaaacgtctaagtatgccctaaatcgtagctctaatgcagatgggcgggcgaggacgttccgggaagcatcgtcaagagtgtcgatgtcgcctgctctagctaagactcgctgcctaggaaaatcctgaacccaagtggctcggtatttgggggtgtagttcctggcgctatcggtgatgtccatagcagtcttggcggcggacgtgttcgttaagtcaataggactccagctggttttgtactcgtaatcttcaagatcaacatcgattcttagctcagtattgaggatctcgatcatgaaactcgaatcagagggaaaacttaactatcatatgcaatatcttcttaagaagagcgcttgccgactacgttatcaagcgatcccacgagcaccaatctggtatcggtaaaagtgttcgcttttctcggcggaaaatccccaaaatgcttggatatttttcttgacggatgaacttggagaagcgctgttctaatgcggcgtcacgccagacagtgtgcgcccggcatcgcccaagcctgagtgtccgaaacatgcttgatgcgtgtgaagcgttcctgcgaccaaggctcagcttgctggggatgctctaattacttctgctgctcgatagtatgcgtcctaggatagacgttgacttgagttgaggttgtctggctcttcgggcctgaggtggggcagctagtcggggcccggtgcggtgaggggtcggggttattcggcaggatcagcagcgcccaaactcgctgctccaagaagaccccgactgtgtgtgagcctaccaactactgccctcgttgtgatgccctaacctgcccggtctgtacgtgaccgacgtcgagcgcggacccgatacgattatggtgggggtgaagttagctccgggcgaggggttctgccccgactgcggtgtgctcgcgtctccccatggccgccgccgggtcctgcacgatgtttcttcggcagtatggcggtcgtgatcgggtggtgtacacgcacgtggcgctgcctcgaagccttgtgtagcaagggctctttcacggaacaagatcctgggatcgccgtactgtgggcggtgttgacccgccgtgccactcgatgggccgtggggcagctgcgccgagaacgcgtctcagtgctgggactcgcacgccaagctcagggcgactggaagactgtctggcgggcggtcaacccggtcttagaggaggcggacgctgacccagtccgctttgcggggatgcggcacctgggggggtgagcacgtctggcacgacaagaacccacgaacccggggaccgaagatgctcaccggcatagctgtcttcacgcacaccgacgacgtcccacgggcccggctgttagacctgaccctgggccgctccggaaccgtgtatggcgtctggctccagtaacgcggccaagcggtggcagcaggtcgagatcaccgcgttggacccgtttcgcgattacaagcacgctatcgatgatcacctcgataacgccacagccgtactgagtcccttccacgtcgtgaaacttgccgcccaggccctcgacgaggcccgacgccgggtccaacaagccccctcaggcaaccgcggccggactagcgacccgctctacggcattcagacgatcctgcgagccggggccgagaacctgtccgacaagcaaaaacaccgtcttgccaccgtgatcgacgctaacgaggcacacgagaaaatgttcattacctggcacaagcagcgtaacggctccgggccgtcaacagaccgatcgaactctaccgccgcatcgcccgtggctccagcaactgcgacaactaccgcctactccgctgctcatcgccgggggcaacacacacgaaccaccgccaagtcagacgagccatttatagcccaacagctatttgggtgatctcctcagcctgacagcgccagacgtcggtccgccatgctaagctgaacgcgtcgcttaagcttcgggaatagaaatgggaaacggtatgactcaaatacttattcaaatactcccggaatagacattcttgcggcgcgctccgctctaatcatttcgtggccgcctctcctacgacgaattgtgcattagggaagtacagtgcatctcagtccatatgtagtctttcgcaggacacgactcgcctactctcaacttcagagcagctccttcgacgcactctggcagcaagtgcaagaaatggtcgataagcatgcgcaattagaggttcagaccagcaggcttacggcacacctggagtctgttatttcagtaactgcgcctcgtgacagatctcgactaatcacattaaagcgtgacgtgcataacatgcgcgtggaaaaagtgaagcaaagactactgcactgtcagggctgcacggctagcaacattatggagcctgtatctagttggatcgatacatgtcgatcatacgaaatacttgagcgtcggttgagtcaagtatatgcggacagccgagacgaagtgtctcgtcactacaggtccctctaccaggctgacgcaatagagccaagcattcaactctcaggtggccagctccacagtgacctgacgcgtctgattagccacggttctaggataaaacccactaaagagcggactctggaaacgactcttgtaaactatctctacagggcagcaacaaagccatcacctttcggtcgtttcgtggaagtaggggccttcgacccgtctcaaccaaattccgaacctcgacgctgcagtgaatccagcgtgacgacaaaccggattcttaccagctggctcactgcagtaacagcgcgttctttcgccgcaccagaaatgcttgctatcctcaacagcaccctgcgcgttaaacgcgatataatccagttcattggaattccacctggggagtggcgaggtgcaccgagcattcccgaggagcgcctgctaactatccgcaagcgcgaagatatgatgtctgttcttaagctcctaatgggcggcccaagatcagtcggtgacctcattattgcccttaatgaccaaggcatagatgaatcacacgcaactaatcttctcagcagtttgagtacagcagggataatcttctttcggctcccagtagatgaccatgacgtacactatgtacagactgcgtgtacagcgctaaggttaaccaaagatgagtcacttcgtgccgctttccaaagtctggcgaacgctgaaaaggagttccccacagcgtcagtcgccacgcgtcacgaccttctcctcagcatcaaggattccgtgaatactgtcgcgtcggcacatgatgtgccggccccaccggacagcgtactcaagagccctttgtatgaggacctccccgccaccgcggcaccccagacatgggattcgaacacggttgagagatcagcccgcgcactcaggagcatctggctactgagcgatttaatggatagctctcaacgccgacagttgggcctctcccagttcatagcagacatgaataatggcgcgccagttacttttctggatttcttcgactcgttttcgcgccttagcattcgtgagcgccaaggaatcctgcgcggagaaaactcaccgcaaatcgcccgtttcgctcagcaatatagtgaagcattgcttaaaattcgcgatgccgttaactacacgcaggacgaagcccaccttgaatctcaggtaattctcgatgcgatcaccaatattgatgatttccgaccgactaagtcggtcacaattcgaggacaattcacaacatcgctcacctcccatataagccaactgataatcaacggtgttatgacgggatacggtacatacatgtcccgattcgcaacatttgtaaacccatcaggtacttggagtctagtcgacgggattcggagacatctatccgatcattttccaggtcaatgtgatttgaattccgtactgggattcaacttcaatgttcatccgcaaatgacagcacatagtatcgcctatcctggagtagttcctgtgcttaatggtgccaagacacattcgattcaggatttaatactgattccaactgctgaagcaggtccgcgccgcgtcgctatctttgatagagcagagaacgaacttatcgacctccagcccatgaatttcatggttccttttggggtgcctttgctgtatcggactctagagttcctgtgcccatcgaccagatacctatggaacccagctcaagaccttctggatatcccaatgatagagaacagttgccctcggatttactttgacgacgtagtggctcaacgccgttcctggacgtgcagcgccgagacgctcccgtgtcccccagagaaactctttaggggtgatcttgctgctttgcaagccttcgactcgtggagactatcagcgagggtacccagacatgtctttgccctagtacaaacggctacggaaagacaaattttttccggagcggccgacgcgccaaccttgctctccgaatacaagcatcttcggagagcaagtgtgcataagccaatctacctggatctacgaaacccacttctagtccgttctctcgcgaaggtgatcatgtccaggcccgaactatatgtcacgttttccgagttcctcccatcggaggccgattacacgcagaacggaagctgccccagttacgcagaggagtacttcattgaactgtgtgccgagtgacagcgcaagcatgtctgatcctggcggctggcgggcgctccatattcacttgcctccctcggtgcagtccgagtacctagctgacgtgattcttccctcgatgtcagccttgatgccagaacatgactacttcttcctccgatattggcaggggggatcacatctccggcttcggctccgtagcactcccgagcgccccctagatgatgaggctatcaacgaggttgcatgccatctccgtagccttctcccggcgttgtcagaccaaaagcgcgcggagtaccgctattcgcaatcgcttcaggatcagttagccgaaatggaaagggctgattgccttcccctagaggcggttgggaccgtggtagagcgccggtaccagcctgaatatagaaagtatggcggatcggtcggagtatccattgcagaggatgttttctgtagtactagccgatctgtccttcgcattctaagtgagcgaccaactagccaccgacagcccttggggtatgcttgccaagttttcatccagatgctgggctgcttagggctcgcaacttcgcaggttgaccagttcctcaccagatatgcgcagtggtggaccccttactcaatggccgctcgccctgagatcttagcggcgcgtctctacgccaacttgtcaagcgtggtggcggacctatgggccgcaagtgagcccaacggaatgttctcggttccggctctcaatgcttatacccaatggtcacggcgacggtcgtccgcgagaaataccagcgtaaagatagacccaatgtttctatcttgcttagcgaactacattcacacaaccaataaccgacttgggctcccacccgccctagaatcgacagcggcatatcttgtccaacttggattccgatcggtggctgtcaggggggagaaagtgcgatgaatccaaaaaactccaaagtgacggaactttggtttccagataattcagactcgccatgtactcttcttctcgacttatctcgggcctccgctgagggcactgagcctagtcctcaatactactgtcgaacttgggacccaacaacaaaagatcccggagtaagggttggcatacttgatcccaaccgcttaactcatcaaacggctttccttggcggttccggtattacgcatcacttcttggtaatggaaaaaccacccagctggcctcttctatggaacgcgggtttcgcgggcttgaagctttccacgataagcaaacaattgttcaccgcgtcatatccatggatggtaaagtgggcgctacaggcatcggcttggacggacgacgaacgccttctggctcttacgaaacttctagttgcccacgctgatgcaagccttccaccggtcgataagactgaaatgctcggccgcctccctttgaagttgagcttgcgactgatcacatatcgttcccactacgaaagcatccgcgctcgcacgattgacccgaaagcgatggatactgcggttaatcgggccttcatgaagtatcaagacgagctcctgcgatggtcccagtcgttgacatgctcgtcgagctatcgtgagaaagaatggagtaatcccaacctttcagaatggagcgccatcatttattgccatctcccacaaattaggcaactcctcagcgggggaggattaactgtcgcgggcccgacacgcgaggatatagaagcctccttaggtcacagtattcctgatacacgatttcacgagcgtcttgaccccgccatgcagtattatctcaatcatgaccaagacttcacggcatacagattctgcacgggttttttgtacagcaacctgtactcgctaggaataccgttgaggctgcgctaccttgtctgtgggttggcagcacgtttcaacgaggagctgtcggacacgacttggcgcgatttacgggatctcttccacgaggctgctactgttgcatattacacacgcgacacagacgggagcgggattagataatgacagttgagcgtcagcctctgcgggagcgtgcaaggagcctcgtttcaccatacggactagtttcccaagtacaccctctgcacgccaatgaagcagatccaccgtttcatgtgcatttgggtcgaacaggccactcaatacacgaggggcaaattacttttgagggagatatcggaaacaccgacggggcagggtcgggatccgacagtaccacggcagaatttattgcagtaatggagtccttagagcgctactccagcgcaatgtgggacgctcgttcctttttgctggaatcggaaaataatctgcaggagcgacttgtatctcccaaccaattcccacgctgttctacagccgagctagattctggacatgtactcaggcggtacgacccgggcgtcccaatacgatgggtcagaggatggtcactgacttcaggtcatcaggtgtgggttccggcgatcgcggtttatctgcatctgccgtacttaaacgactctgaacgattcatacgttcagtctcgaccggatgtgcggttcatgaatccatgcggaaggctgttcttaacggtcttttagaagtcgtcgagcgagatgctattgctttgacttggttgcatgagttgcccttgcccagaatcgcggctagcgaggccggtgagttcccgccggaagcgctagccagttggaagtcatatagggattacggaatcgagacccatctctttgacgcaacgacggattttgggattccggtgatctttgcgctccagatatcggatcaggatgacgacatcgctcagctcgtaggcgctgcatccgctttggaacccgctgaggcgctgactaaagtattcagggaaatggcatcgatccgaatagcactacgcgcctttctcgcccagtccacatcgattaagatttaccccgatgtggctaacgtgacagggggtgccgccctcatgggccagcgcgcgtaccgagatgcattttccttcctccttaacagcgagcgcgaaacgtcaccgtcgcggatgcctaacctcctagagctgaatgatgatccactgcgcgagatgattattcgaatacgcctggctggcgctgaagttatcgccgtcgatatcacgacggacagagcgaggtcagttggtgcaagagtagtgaaggttttggtcccagaggcggttccactctcctttgttcaccgagagaggtatttagatactcctcggctcatatccgcgcctaatagcatgggatatttggttgacacagcgcctacgttcaaccggaacattcaaccttttgcgtgaaactcatatcaaggaaggccagaccgactaatggaccgcttcgttgtgactcggacgctcttcggcgtggagctcgctaaagaactccagtcctccatcttagaggatgggccatacataggcgactcagttcctcactggaaacaaaatcaattactcgtgtacgtgacgacagatgaggcatccccaaggttggactcaattgacggcggggcgttctcagctggccggccttggctccccgtccgtcttcgacccacagtgattcactgcggccccataatttggccaggtagtacgccttgcttccggtgcagtgtgaaccgaatgaagcagcactctcccatgcctagtctcgtaggttcaggaccggagcttgtggaaggctatgcggcgtttcatgtcagacttatagcggcagcgatctcgttgctggaggagagattctctgagggggagatcttaggtaggggcttatcatttaatcttgtcaacgggtttcttaaccactatcctatcgtgcccgttgatcgctgtccgagatgcggtggccgtttcggtaaacgggaagatgagcaccaagagttgggctgcgtcgcacgggaggtgtgtcaagtatgaagggtataatcagtggtgaacaggtgggaaatgcagctcgctttgacaagcagttcagggtccctcgtcggccgagcaggcggctcggtgtcgatattgagatccgtgaggatgcaacaattctttggggatcagatcgtctgcagacatttacaggaggaatgaaaccttcactgattgaggatattttacgagcgtgcgacggaactaagacggcacgtgagctcgcctctgtatgtgatgttacggagcccttgatggacaagatagtggcccttctctgggtctcgggtgctattgaggaggcgggcccgaccgatgttgaaagttctccgcttggggtccttttgtctcgccttgggaacgcaactggggcgaatgctagctggcaggaagctcagcacagaattaacagcatgccgatctgtgttatgccccattcggaacttggaacggaggttgcgggcgcgcttgctggcacctttgaggttatcaatgaagaggcagcttttgaacgcggcgtggttctattcatctttatcgaaaccgcgtcgtctaagatcgaacagcatcacaaatttgatgaactgacaaagagaagagtgctattggttagcgctgcgggtgacgaagttgtagtggggccgctttatgaccaggctataacgccctgccttcggtgctgttcgtcatcgaggatcaagctggatcggggtgcctcgagcccggcgcagcttcgtctcatggctggaattgtctcgcatcatattgttgcgttggtaagcagggcgttactctcaccgctgcccacggattccttggcgctgaatgtggtcactggtgtccagcgctactctcccccggtgtccagaccgggttgccccgaatgttcgcatgcgatcccagctattgctagtgagccgacggtcggtgccgtgtacgaggcttccgtagcactccctccgcgagaattcgtgaatgtaagggactatcaagcccacttcttgagcgcaaatcaacaacttcaaacgaaatttaagtcatggggaaaaagggaaaaattccctttgcctgacattaatatttcagacctacatatacagattgacgaccttctttttttagctgctgcccttaggtttgggttcggaatagacccggagcggaccacttcaaaaatagcgaagcgctggacggcctctggtggaaacattggctcggtaaacgcattcgtgagccttcctgcgatggtagggcacattcccagtgggatttatggatattcagttagcgatcattccctagccaaagttagtcaggagttgatttcggcgactgacatcatgatcgcggcttctgccgacctacggaagatcgcttctaaatatgggacattcggcttgaggatcgcgattatggacgccgggtgtgccctttcaacggtgcgtcgtgtctgccgggaagtaggccgtacattttcgatgtggagcgctgacctcgacgctgggtctattagcgagatgctgcatctttcaagtgcgcgtgagcctattattggagtttcagtgctgggaaaggggcaacgagggtgaggacagacattcccgtaatgaatgccattctgtgtggaatttctggtttgaggccgagagttgcggagctccggctgaatcatgtaccaggagaacttgaaggtgacctgatcggcgagttctcggggccagttactccggatgaaggatcaccttgtctgccgtgcaagagcttccccgaattcttgcagacaaggaggtcggtatcccattttagagacgaggcggttgacgcacgctgcgtcatccatgcagtggctcaggctcttgaggatgatgagcgactgtgggggtgctcagagaccgctggtcttcttgaggcgtttgtctttgtgcttcgagatagtgttggcggtcctggaccggggatctatcaggtgcggcgcgattctgcggtgagaatgacaactgccgctgaacttggcgatccgattcgattcggtgttcaggaggaattcttcgcagggtcaggggtagttatcttttgcgcgaatctggacgtggaggatggcgccggaggagcaaacggatacttagttaatactctccgagcttccatggcactctacgaagtccatgttgaactcggttgcatggacgtggttggctccgttttcggaggcttcattccagcttcgctgcgatcgctcctgttggcagatatggttactcgtcagcaaatcatctcttgctcctatggttttccagcctaacttgctcgacccgccagtagctgggttgtgaattgggtaatgaatggatcgaaataatttgtaccatctgagtcgcgagaaggtaaatacaaatgaaaatgaggcacttaatctcaatgtgatggagttctcggacatgattagcgacgctactgagcgcgacgacgtcactcagataatggcggcatcttgcgtcgagacgagtgtatcgtcgagttccacgtcatcttcatgatcgccaagtggcagattatggagccaggagaagaggtccgtacagggcgaatactcagacgcgacttagccttcgcagttgtcgtggaagtttatctagccgtcttaggttgtttcagcaaccctacacgggaagatactcttagcgctctggggtgggattatttggttcgccaaagcgattcaaggcttcctctctaggcggttatgattagtgtcgaaaccaattgaggggaggtgaacagaatggagaacgaaacgttggaccttgacgtgatggagctggccgatatcatcggtagtgcttctgatcaagacgacatggctcaggtcatggctgcgtcgtgcaccaccacgagtgtctcgacgagctcttcgtcgtcctcgtaacgagatgggcgggctggcgggtgcttttcgggcccgccggcccgttcctttgttatttacggttctttgcttgagcgggctgaatcgtggtggggaggttgtctaaaatttgggctcgggctcgaggccggccgcgtaaattgaccacaatgagcgtgctgcggtaacttagacgtaagatacgcttctcctgctagccttatttgttacccgtttggatttcacctagatgcacgctagggtaggctgattagcttttatggaaatgatattattattatgataattagtgtagatgggatttggaggggcatcgtgtagctagtctcaaatagaagcgatcccgcagtgcagcgtattttggatatgtccaggccttcgttcaagctggtttgatgtttttaaaggatgtggtgaccgttcacattgcgcatggctgccggtgtgcacattgttgagatgtattcggaggctggaaaggcagcggctttttcaattgacgcgtatgcaaccctgggggttccatatcgagaaatgtcatcattgttgttgtcgtaagtattcaaggtgggtaagcgccctgagattttcgctgttgatcgggtggcgcatgaggctaatgccggcgtaattgatccgaagctagatttggttgttttgaacagtttgcacaccgtcggtaatatgggggcgataatttagacctcctttgtgcttggctcaagggcttttgttctagtggacagaaacttgagctctatttccgataggagggttcttctggcttctcctagatacgtctttcttcttctggttctgagagctagtcgcgatgagcttcttgagttgtgcaccagtcgtcgggaactggtgaaattcttggcggatggctatgtggatatggcctttttctggtcttgagaccatccgatcacgatggtctagggaagcaaggataagggtgtgtcgataatttgattatcggatttccatctccgttagaattctgatgctggcggatgctaagtcattgaatgatgtgtctgtggcggtcggaattggactacatgagaggccgcagcgtgacttggagagcggatcttaggaatcagttcagggccaggactcccatccaggccatcagtttgttggcgaagctgacgatcagctgcccgatccagttctgtgtgaagccttttcaacgacagatcggtcaggctggtgtccttcgctgtcagggtcaggtctaacagccgggcccgtgggacgtcgtcggtgtgcgtgaagacagctatgccggtgagcatcttcggtccccgggttcgtgggttcttgtcgtgccagacgtgctcacccccccaggtgccgcatccccgcaaagcggactgggtcagcgtccgcctcctctaagaccgggttgaccgcccgccagacagtcttccagtcgccctgagcttggcgtgcgagtcccagcactgagacgcgttctcggcgcagctgccccacggcccatcgagtggcacggcgggtcaacaccgcccacagtacggcgatcccaggatcttgttccgtgaaagagcccttgctacacaaggcttcgaggcagcgccacgtgcgtgtacaccacccgatcacgaccgccatactgccgaagaaacatcgtgcaggacccggcggcggccatggggagacgcgagcacaccgcagtcggggcagaacccctcgcccggagctaacttcacccccaccataatcgtatcgggtccgcgctcgacgtcggtcacgtacagaccgggcaggttagggcatcacaacgagggcagtagttggtaggctcacacacagtcggggtcttcttggagcagcgagtttgggcgctgctgatcctgccgaataaccccgacccctcaccgcaccgggccccgactagctgccccacctcaggcccgaagagccagacaactcttgttgagcttcaaagccatgaaatcttcggtctgcttcttaatgccagtctctgccgggaatcgctcgatggaagatgcgccgtagaagcctacgatgccatcggtgtgatcgagaatgtattgcgcatcctcgggattggcgatggggccgccatggcataggcataggatgtcgggattgacggatttggcggcgtcggcgagttcctgaaccttgacagcagcatcctcgatagtgagtgctgtttttgcaccaatggttccggaggttgtcagacccatgtgggggacgaggatgtcagagcccgcccgggccatatccttggcctggtcaacgtcgaaaacatagggtgaggtgaggagatcaagatcgtgggcaattttgatcatgtcgatctccaaaccgtaccccatgccagtttcctcgaggtttgcgcggaatgtgccatcgatgagaccaacagtagggaaattctgcactccggcgaaccccgcggctttgatctgggttaggactggggcatcactctgaagggatcagtgccattaactccggcaagaactggggtgtgcttgacgacgggcagtacctcgcgcgccatgtccatggcgatctcattggcatcgccgtaagcgagaagccctgagagggagccgcgacctgccatccggaaacgtcctgagttatagatgacgagcagatcgataccgccggcttccgcggatttaaccgtaatcccggtgcctgcgccgccgcccaccaaggggattccgttggcgacttgtccgcggaactttttcaggatttcagtgcgggtcatgatgctattcctttccgattagttatggatgatgagctcgtgaagagcccgcgccattgcttcgccaaaaccagaatcattgatattttgttttcgctcagtcacagtgatgtcggtatcctttattccctctcgaatggcgttgaacaaagcgtcatcggcttctggatcatagaaatcttcacctggggtatctattcctgcgacccccagagtaggaatgaaagcttgagccgggccgcgcgcagcggccgcctttatggcgattctgtgaccaagctcggccatttcggtgttgctcgtttgagcgtcaccgctggattgtggatatgcaacgtgcgagaggaatagcgctccggaatagtgtcgacagggccgaaattgaccatgtcaagcgcgccaagactgatgacttcgggtattccaaggtctgctgcggcttccatccggcggggtcctgccgagagaactcctccgcagaggtcgtcggcaagctcggtagtcgtcaggtcacatattcccgcgagtagcccagacgatgcgagcttttctatcgccttcccctcccggaatcagttgcgtggaagacgaggacctcgtacccaaggtctgtcaaggtcttgcgagcttcgtcagcagccggcgttgtcaatccgaacatcgtcaggccgacgaccggtttgttgtgagcggggttgctgacggttctaacgtcttcatactccttggccatggctgtgatagcggcggctgcattggcgaagaccatgagcgacacggaattgatgccggccacgtcaacgacggagtacataagtgtgacgtcggtttgtcccacgtaggggctgacatctccggaagccatcgtggaaaccaggagcttggggaatccaatcggcaatgtctgcatgaccgaagccgctacggatgatccacctgatccgccgagggacaggagaccgtggattttcccctcttcggcaagcttggatgcaataatcgaagcgccacggcccatgacatccatcatttcgccacggttatgacgtgttcggatgtcacttggcgactcgcctgcggcacgaatgacctcatcggacgtgtagtcggctatacggctgttggagaatgagccaacatcgatgatgactacctggctgccgttggtaagaatgcggtgacgaagccagtcgaactcgtctcccttggtatccaaagttccgagcaaagctattgcggccatgaacactccttcgtgatcgtgtcatcatgaccgtagttcggtgattctgcctacaccatgccgtttgagacgaattggcctgtacgttgtatcgctggttgtgaagaagggcaatacttcaggtgtggttgtcaaggttgaccctgcaagtctgagccggatgctgggggagtggagccagcccggagaagcgcttccggaagcgttggcggacgcattgctggatctcattgacgctggttttgtgcccgctggtgcggttcttccaccccaacgagcatgcgccgcgacactgcaagtatctcggcaaaccgtggcggaggcatttgggattcttgaagccgcaggccacattgcggcgttggttgggtcagggacgcgggttagatcaggccgcgctgcagtgagtactgatggcaggttgttctcgttcagcgaggctgcacctggcctgatcgacctgtcaacgggggcgctacctgcgtcagaggtggtgcgaagagtgcggctagaagaccacgtcgacttggatgagtatttcgataccgacggatatttcccggctggactacctatattgcgtgcagccatcgcggaacggctcactcgagatggagttcccacagtcccgcagcagatcgttgttaccaacggcgctcagcatgcgagttatcttgcctctcagctcctggtctcggctggtgacaccgtgttggtggaggagccgacatatcggggtgagctcgcagagctgcgactgatgggcgcccgtgtgaagagtgtccc

SEQ ID NO: 57 - DNA, 12237 bp, Propionibacterium acnes
  source 1..12237: mol_type = genomic DNA
gttgtctggctcttcgggcctgaggtggggcagctagtcggggcccggtgcggtgaggggtcggggttattcggcaggatcagcagcgcccaaactcgctgctccaagaagaccccgactgtgtgtgagcctaccaactactgccctcgttgtgatgccctaacctgcccggtctgtacgtgaccgacgtcgagcgcggacccgatacgattatggtgggggtgaagttagctccgggcgaggggttctgccccgactgcggtgtgctcgcgtctccccatggccgccgccgggtcctgcacgatgtttcttcggcagtatggcggtcgtgatcgggtggtgtacacgcacgtggcgctgcctcgaagccttgtgtagcaagggctctttcacggaacaagatcctgggatcgccgtactgtgggcggtgttgacccgccgtgccactcgatgggccgtggggcagctgcgccgagaacgcgtctcagtgctgggactcgcacgccaagctcagggcgactggaaaactgtctggcgggcggtcaacccggtcttagaggaggcggacgctgacccagtccgctttgcggggatgcggcacctgggggggtgagcacgtctggcacgacaagaacccacgaacccggggaccgaagatgctcaccggcatagctgtcttcacgcacaccgacgacgtcccacgggcccggctgttagacctgaccctgggccgctccggaaccgtgtatggcgtctggctccagtaacgcggccaagcggtggcagcaggtcgagatcaccgcgttggacccgtttcgcgattacaagcacgctatcgatgatcacctcgataacgccacagccgtactgagtcccttccacgtcgtgaaacttgccgcccaggccctcgacgaggcccgacgccgggtccaacaagccccctcaggcaaccgcggccggactagcgacccgctctacggcattcagacgatcctgcgagccggggccgagaacctgtccgacaagcaaaaacaccgtcttgccaccgtgatcgacgctaacgaggcacacgagaaaatgttcattacctggcacaagcagcgtaacggctccgggccgtcaacagaccgatcgaactctaccgccgcatcgcccgtggctccagcaactgcgacaactaccgcctactccgctgctcatcgccgggggcaacacacacgaaccaccgccaagtcagacgagccatttatagcccaacagctatttgggtgatctcctcagcctgacagcgccagacgtcggtccgccatgctaagctgaacgcgtcgcttaagcttcgggaatagaaatgggaaacggtatgactcaaatacttattcaaatactcccggaatagacattcttgcggcgcgctccgctctaatcatttcgtggccgcctctcctacgacgaattgtgcattagggaagtacagtgcatctcagtccatatgtagtctttcgcaggacacgactcgcctactctcaacttcagagcagctccttcgacgcactctggcagcaagtgcaagaaatggtcgataagcatgcgcaattagaggttcagaccagcaggcttacggcacacctggagtctgttatttcagtaactgcgcctcgtgacagatctcgactaatcacattaaaacgtgacgtgcataacatgcgcgtggaaaaagtgaagcaaagactactgcactgtcagggctgcacggctagcaacattatggagcctgtatctagttggatcgatacatgtcgatcatacgaaatacttgagcgtcggttgagtcaagtatatgcggacagccgagacgaagtgtctcgtcactacaggtccctctaccaggctgacgcaatagagccaagcattcaactctcaggtggccagctccacagtgacctgacgcgtctgattagccacggttctaggataaaacccactaaagagcggactctggaaacgactcttgtaaactatctctacagggcagcaacaaagccatcacctttcggtcgtttcgtggaagtaggggccttcgacccgtctcaaccaaattccgaacctcgacgctgcagtgaatccagcgtgacgacaaaccggattcttaccagctggctcactgcagtaacagcgcgttctttcgccgcaccagaaatgcttgctatcctcaacagcaccctgcgcgttaaacgcgatataatccagttcattggaattccacctggggagtggcgaggtgcaccgagcattcccgaggagcgcctgctaactatccgcaagcgcgaagatatgatgtctgttcttaagctcctaatgggcggcccaagatcagtcggtgacctcattattgcccttaatgaccaaggcatagatgaatcacacgcaactaatcttctcagcagtttgagtacagcagggataatcttctttcggctcccagtagatgaccatgacgtacactatgtacagactgcgtgtacagcgctaaggttaaccaaagatgagtcacttcgtgccgctttccaaagtctggcgaacgctgaaaaggagttccccacagcgtcagtcgccacgcgtcacgaccttctcctcagcatcaaggattccgtgaatactgtcgcgtcggcacatgatgtgccggccccaccggacagcgtactcaagagccctttgtatgaggacctccccgccaccgcggcaccccagacatgggattcgaacacggttgagagatcagcccgcgcactcaggagcatctggctactgagcgatttaatggatagctctcaacgccgacagttgggcctctcccagttcatagcagacatgaataatggcgcgccagttacttttctggatttcttcgactcgttttcgcgccttagcattcgtgagcgccaaggaatcctgcgcggagaaaactcaccgcaaatcgcccgtttcgctcagcaatatagtgaagcattgcttaaaattcgcgatgccgttaactacacgcaggacgaagcccaccttgaatctcaggtaattctcgatgcgatcaccaatattgatgatttccgaccgactaagtcggtcacaattcgaggacaattcacaacatcgctcacctcccatataagccaactgataatcaacggtgttatgacgggatacggtacatacatgtcccgattcgcaacatttgtaaacccatcaggtacttggagtctagtcgacgggattcggagacatctatccgatcattttccaggtcaatgtgatttgaattccgtactgggattcaacttcaatgttcatccgcaaatgacagcacatagtatcgcctatcctggagtagttcctgtgcttaatggtgccaagacacattcgattcaggatttaatactgattccaactgctgaagcaggtccgcgccgcgtcgctatctttgatagagcagagaacgaacttatcgacctccagcccatgaatttcatggttccttttggggtgcctttgctgtatcggactctagagttcctgtgcccatcgaccagatacctatggaacccagctcaagaccttctggatatcccaatgatagagaacagttgccctcggatttactttgacgacgtagtggctcaacgccgttcctggacgtgcagcgccgagacgctcccgtgtcccccagagaaactctttaggggtgatcttgctgctttgcaagccttcgactcgtggagactatcagcgagggtacccagacatgtctttgccctagtacaaacggctacggaaagacaaattttttccggagcggccgacgcgccaaccttgctctccgaatacaagcatcttcggagagcaagtgtgcataagccaatctacctggatctacgaaacccacttctagtccgttctctcgcgaaggtgatcatgtccaggcccgaactatatgtcacgttttccgagttcctcccatcggaggccgattacacgcagaacggaagctgccccagttacgcagaggagtacttcattgaactgtgtgccgagtgacagcgcaagcatgtctgatcctggcggctggcgggcgctccatattcacttgcctccctcggtgcagtccgagtacctagctgacgtgattcttccctcgatgtcagccttgatgccagaacatgactacttcttcctccgatattggcaggggggatcacatctccggcttcggctccgtagcactcccgagcgccccctagatgatgaggctatcaacgaggttgcatgccatctccgtagccttctcccggcgttgtcagaccaaaagcgcgcggagtaccgctattcgcaatcgcttcaggatcagttagccgaaatggaaagggctgattgccttcccctagaggcggttgggaccgtggtagagcgccggtaccagcctgaatatagaaagtatggcggatcggtcggagtatccattgcagaggatgttttctgtagtactagccgatctgtccttcgcattctaagtgagcgaccaactagccaccgacagcccttggggtatgcttgccaagttttcatccagatgctgggctgcttagggctcgcaacttcgcaggttgaccagttcctcaccagatatgcgcagtggtggaccccttactcaatggccgctcgccctgagatcttagcggcgcgtctctacgccaacttgtcaagcgtggtggcggacctatgggccgcaagtgagcccaacggaatgttctcggttccggctctcaatgcttatacccaatggtcacggcgacggtcgtccgcgagaaataccagcgtaaagatagacccaatgtttctatcttgcttagcgaactacattcacacaaccaataaccgacttgggctcccacccgccctagaatcgacagcggcatatcttgtccaacttggattccgatcggtggctgtcaggggggagaaagtgcgatgaatccaaaaaactccaaagtgacggaactttggtttccagataattcagactcgccatgtactcttcttctcgacttatctcgggcctccgctgagggcactgagcctagtcctcaatactactgtcgaacttgggacccaacaacaaaagatcccggagtaagggttggcatacttgatcccaaccgcttaactcatcaaacggctttccttggcggttccggtattacgcatcacttcttggtaatggaaaaaccacccagctggcctcttctatggaacgcgggtttcgcgggcttgaagctttccacgataagcaaacaattgttcaccgcgtcatatccatggatggtaaagtgggcgctacaggcatcggcttggacggacgacgaacgccttctggctcttacgaaacttctagttgcccacgctgatgcaagccttccaccggtcgataagactgaaatgctcggccgcctccctttgaagttgagcttgcgactgatcacatatcgttcccactacgaaagcatccgcgctcgcacgattgacccgaaagcgatggatactgcggttaatcgggccttcatgaagtatcaagacgagctcctgcgatggtcccagtcgttgacatgctcgtcgagctatcgtgagaaagaatggagtaatcccaacctttcagaatggagcgccatcatttattgccatctcccacaaattaggcaactcctcagcgggggaggattaactgtcgcgggcccgacacgcgaggatatagaagcctccttaggtcacagtattcctgatacacgatttcacgagcgtcttgaccccgccatgcagtattatctcaatcatgaccaagacttcacggcatacagattctgcacgggttttttgtacagcaacctgtactcgctaggaataccgttgaggctgcgctaccttgtctgtgggttggcagcacgtttcaacgaggagctgtcggacacgacttggcgcgatttacgggatctcttccacgaggctgctactgttgcatattacacacgcgacacagacgggagcgggattagataatgacagttgagcgtcagcctctgcgggagcgtgcaaggagcctcgtttcaccatacggactagtttcccaagtacaccctctgcacgccaatgaagcagatccaccgtttcatgtgcatttgggtcgaacaggccactcaatacacgaggggcaaattacttttgagggagatatcggaaacaccgacggggcagggtcgggatccgacagtaccacggcagaatttattgcagtaatggagtccttagagcgctactccagcgcaatgtgggacgctcgttcctttttgctggaatcggaaaataatctgcaggagcgacttgtatctcccaaccaattcccacgctgttctacagccgagctagattctggacatgtactcaggcggtacgacccgggcgtcccaatacgatgggtcagaggatggtcactgacttcaggtcatcaggtgtgggttccggcgatcgcggtttatctgcatctgccgtacttaaacgactctgaacgattcatacgttcagtctcgaccggatgtgcggttcatgaatccatgcggaaggctgttcttaacggtcttttagaagtcgtcgagcgagatgctattgctttgacttggttgcatgagttgcccttgcccagaatcgcggctagcgaggccggtgagttcccgccggaagcgctagccagttggaagtcatatagggattacggaatcgagacccatctctttgacgcaacgacggattttgggattccggtgatctttgcgctccagatatcggatcaggatgacgacatcgctcagctcgtaggcgctgcatccgctttggaacccgctgaggcgctgactaaagtattcagggaaatggcatcgatccgaatagcactacgcgcctttctcgcccagtccacatcgattaagatttaccccgatgtggctaacgtgacagggggtgccgccctcatgggccagcgcgcgtaccgagatgcattttccttcctcattaacagcgagcgcgaaacgtcaccgtcgcggatgcctaacctcctagagctgaatgatgatccactgcgcgagatgattattcgaatacgcctggctggcgctgaagttatcgccgtcgatatcacgacggacgaagcgaggtcagttggtgcaagagtagtgaaggttttggtcccagaggcggttccactctcctttgttcaccgagagaggtatttagatactcctcggctcatatccgcgcctaatagcatgggatatttggttgacacagcgcctacgttcaaccggaacattcaaccttttgcgtgaaactcatatcaaggaaggccagaccgactaatggaccgcttcgttgtgactcggacgctcttcggcgtggagctcgctaaagaactccagtcctccatcttagaggatgggccatacataggcgactcagttcctcactggaaacaaaatcaattactcgtgtacgtgacgacagatgaggcatccccaaggttggactcaattgacggcggggcgttctcagctggccggccttggctccccgtccgtcttcgacccacagtgattcactgcggccccataatttggccaggtagtacgccttgcttccggtgcagtgtgaaccgaatgaagcagcactctcccatgcctagtctcgtaggttcaggaccggagcttgtggaaggctatgcggcgtttcatgtcagacttatagcggcagcgatctcgttgctggaggagagattctctgagggggagatcttaggtaggggcttatcatttaatcttgtcaacgggtttcttaaccactatcctatcgtgcccgttgatcgctgtccgagatgcggtggccgtttcggtaaacgggaagatgagcaccaagagttgggctgcgtcgcacgggaggtgtgtcaagtatgaagggtataatcagtggtgaacaggtgggaaatgcagctcgctttgacaagcagttcagggtccctcgtcggccgagcaggcggctcggtgtcgatattgagatccgtgaggatgcaacaattctttggggatcagatcgtctgcagacatttacaggaggaatgaaaccttcactgattgaggatattttacgagcgtgcgacggaactaagacggcacgtgagctcgcctctgtatgtgatgttacggagcccttgatggacaagatagtggcccttctctgggtctcgggtgctattgaggaggcgggcccgaccgatgttgaaagttctccgcttggggtccttttgtctcgccttgggaacgcaactggggcgaatgctagctggcaggaagctcagcacagaattaacagcatgccgatctgtgttatgccccattcggaacttggaacggaggttgcgggcgcgcttgctggcacctttgaggttatcaatgaagaggcagcttttgaacgcggcgtggttctattcatctttatcgaaaccgcgtcgtctaagatcgaacagcatcacaaatttgatgaactgacaaagagaagagtgctattggttagcgctgcgggtgacgaagttgtagtggggccgctttatgaccaggctataacgccctgccttcggtgctgttcgtcatcgaggatcaagctggatcggggtgcctcgagcccggcgcagcttcgtctcatggctggaattgtctcgcatcatattgttgcgttggtaagcagggcgttactctcaccgctgcccacggattccttggcgctgaatgtggtcactggtgtccagcgctactctcccccggtgtccagaccgggttgccccgaatgttcgcatgcgatcccagctattgctagtgagccgacggtcggtgccgtgtacgaggcttccgtagcactccctccgcgagaattcgtgaatgtaagggactatcaagcccacttcttgagcgcaaatcaacaacttcaaacgaaatttaagtcatggggaaaaagggaaaaattccctttgcctgacattaatatttcagacctacatatacagattgacgaccttctttttttagctgctgcccttaggtttgggttcggaatagacccggagcggaccacttcaaaaatagcgaagcgctggacggcctctggtggaaacattggctcggtaaacgcattcgtgagccttcctgcgatggtagggcacattcccagtgggatttatggatattcagttagcgatcattccctagccaaagttagtcaggagttgatttcggcgactgacatcatgatcgcggcttctgccgacctacggaagatcgcttctaaatatgggacattcggcttgaggatcgcgattatggacgccgggtgtgccctttcaacggtgcgtcgtgtctgccgggaagtaggccgtacattttcgatgtggagcgctgacctcgacgctgggtctattagcgagatgctgcatctttcaagtgcgcgtgagcctattattggagtttcagtgctgggaaaggggcaacgagggtgaggacagacattcccgtaatgaatgccattctgtgtggaatttctggtttgaggccgagagttgcggagctccggctgaatcatgtaccaggagaacttgaaggtgacctgatcggcgagttctcggggccagttactccggatgaaggatcaccttgtctgccgtgcaagagcttccccgaattcttgcagacaaggaggtcggtatcccattttagagacgaggcggttgacgcacgctgcgtcatccatgcagtggctcaggctcttgaggatgatgagcgactgtgggggtgctcagagaccgctggtcttcttgaggcgtttgtctttgtgcttcgagatagtgttggcggtcctggaccggggatctatcaggtgcggcgcgattctgcggtgagaatgacaactgccgctgaacttggcgatccgattcgattcggtgttcaggaggaattcttcgcagggtcaggggtagttatcttttgcgcgaatctggacgtggaggatggcgccggaggagcaaacggatacttagttaatactctccgagcttccatggcactctacgaagtccatgttgaactcggttgcatggacgtggttggctccgttttcggaggcttcattccagcttcgctgcgatcgctcctgttggcagatatggttactcgtcagcaaatcatctcttgctcctatggttttccagcctaacttgctcgacccgccagtagctgggttgtgaattgggtaatgaatggatcgaaataatttgtaccatctgagtcgcgagaaggtaaatacaaatgaaaatgaggcacttaatctcaatgtgatggagttctcggacatgattagcgacgctactgagcgcgacgacgtcactcagataatggcggcatcttgcgtcgagacgagtgtatcgtcgagttccacgtcatcttcatgatcgccaagtggcagattatggagccaggagaagaggtccgtacagggcgaatactcagacgcgacttagccttcgcagttgtcgtggaagtttatctagccgtcttaggttgtttcagcaaccctacacgggaagatactcttagcgctctggggtgggattatttggttcgccaaagcgattcaaggcttcctctctaggcggttatgattagtgtcgaaaccaattgaggggaggtgaacagaatggagaacgaaacgttggaccttgacgtgatggagctggccgatatcatcggtagtgcttctgatcaagacgacatggctcaggtcatggctgcgtcgtgcaccaccacgagtgtctcgacgagctcttcgtcgtcctcgtaacgagatgggcgggctggcgggtgcttttcgggcccgccggcccgttcctttgttatttacggttctttgcttgagcgggctgaatcgtggtggggaggttgtctaaaatttgggctcgggctcgaggccggccgcgtaaattgaccacaatgagcgtgctgcggtaacttagacgtaagatacgcttctcctgctagccttatttgttacccgtttggatttcacctagatgcacgctagggtaggctgattagcttttatggaaatgatattattattatgataattagtgtagatgggatttggaggggcatcgtgtagctagtctcaaatagaagcgatcccgcagtgcagcgtattttggatatgtccaggccttcgttcaagctggtttgatgtttttaaaggatgtggtgaccgttcacattgcgcatggctgccggtgtgcacattgttgagatgtattcggaggctggaaaggcagcggctttttcaattgacgcgtatgcaaccctgggggttccatatcgagaaatgtcatcattgttgttgtcgtaagtattcaaggtgggtaagcgccctgagattttcgctgttgatcgggtggcgcatgaggctaatgccggcgtaattgatccgaagctagatttggttgttttgaacagtttgcacaccgtcggtaatatgggggcgataatttagacctcctttgtgcttggctcaagggcttttgttctagtggacagaaacttgagctctatttccgataggagggttcttctggcttctcctagatacgtctttcttcttctggttctgagagctagtcgcgatgagcttcttgagttgtgcaccagtcgtcgggaactggtgaaattcttggcggatggctatgtggatatggcctttttctggtcttgagaccatccgatcacgatggtctagggaagcaaggataagggtgtgtcgataatttgattatcggatttccatctccgttagaattctgatgctggcggatgctaagtcattgaatgatgtgtctgtggcggtcggaattggactacatgagaggccgcagcgtgacttggagagcggatcttaggaatcagttcagggccaggactcccatccaggccatcagtttgttggcgaagctgacgatcagctgcccgatccagttctgtgtgaagccttttcaacgacagatcggtcaggctggtgtccttcgctgtcagggtcaggtctaacagccgggcccgtgggacg

SEQ ID NO: 58 - DNA, 3582 bp, Propionibacterium acnes
  source 1..3582: mol_type = genomic DNA
cagggtcaggtctaacagccgggcccgtgggacgtcgtcggtgtgcgtgaagacagctatgccggtgagcatcttcggtccccgggttcgtgggttcttgtcgtgccagacgtgctcacccccccaggtgccgcatccccgcaaagcggactgggtcagcgtccgcctcctctaagaccgggttgaccgcccgccagacagttttccagtcgccctgagcttggcgtgcgagtcccagcactgagacgcgttctcggcgcagctgccccacggcccatcgagtggcacggcgggtcaacaccgcccacagtacggcgatcccaggatcttgttccgtgaaagagcccttgctacacaaggcttcgaggcagcgccacgtgcgtgtacaccacccgatcacgaccgccatactgccgaagaaacatcgtgcaggacccggcggcggccatggggagacgcgagcacaccgcagtcggggcagaacccctcgcccggagctaacttcacccccaccataatcgtatcgggtccgcgctcgacgtcggtcacgtacagaccgggcaggttagggcatcacaacgagggcagtagttggtaggctcacacacagtcggggtcttcttggagcagcgagtttgggcgctgctgatcctgccgaataaccccgacccctcaccgcaccgggccccgactagctgccccacctcaggcccgaagagccagacaactcttgttgagcttcaaagccatgaaatcttcggtctgcttcttaatgccagtctctgccgggaatcgctcgatggaagatgcgccgtagaagcctacgatgccatcggtgtgatcgagaatgtattgcgcatcctcgggattggcgatggggccgccatggcataggcataggatgtcgggattgacggatttggcggcgtcggcgagttcctgaaccttgacagcagcatcctcgatagtgagtgctgtttttgcaccaatggttccggaggttgtcagacccatgtgggggacgaggatgtcagagcccgcccgggccatatccttggcctggtcaacgtcgaaaacatagggtgaggtgaggagatcaagatcgtgggcaattttgatcatgtcgatctccaaaccgtaccccatgccagtttcctcgaggtttgcgcggaatgtgccatcgatgagaccaacagtagggaaattctgcactccggcgaaccccgcggctttgatctgggttaggactggggcatcactctgaagggatcagtgccattaactccggcaagaactggggtgtgcttgacgacgggcagtacctcgcgcgccatgtccatggcgatctcattggcatcgccgtaagcgagaagccctgagagggagccgcgacctgccatccggaaacgtcctgagttatagatgacgagcagatcgataccgccggcttccgcggatttaaccgtaatcccggtgcctgcgccgccgcccaccaaggggattccgttggcgacttgtccgcggaactttttcaggatttcagtgcgggtcatgatgctattcctttccgattagttatggatgatgagctcgtgaagagcccgcgccattgcttcgccaaaaccagaatcattgatattttgttttcgctcagtcacagtgatgtcggtatcctttattccctctcgaatggcgttgaacaaagcgtcatcggcttctggatcatagaaatcttcacctggggtatctattcctgcgacccccagagtaggaatgaaagcttgagccgggccgcgcgcagcggccgcctttatggcgattctgtgaccaagctcggccatttcggtgttgctcgtttgagcgtcaccgctggattgtggatatgcaacgtgcgagaggaatagcgctccggaatagtgtcgacagggccgaaattgaccatgtcaagcgcgccaagactgatgacttcgggtattccaaggtctgctgcggcttccatccggcggggtcctgccgagagaactcctccgcagaggtcgtcggcaagctcggtagtcgtcaggtcacatattcccgcgagtagcccagacgatgcgagcttttctatcgccttcccctcccggaatcagttgcgtggaagacgaggacctcgtacccaaggtctgtcaaggtcttgcgagcttcgtcagcagccggcgttgtcaatccgaacatcgtcaggccgacgaccggtttgttgtgagcggggttgctgacggttctaacgtcttcatactccttggccatggctgtgatagcggcggctgcattggcgaagaccatgagcgacacggaattgatgccggccacgtcaacgacggagtacataagtgtgacgtcggtttgtcccacgtaggggctgacatctccggaagccatcgtggaaaccaggagcttggggaatccaatcggcaatgtctgcatgaccgaagccgctacggatgatccacctgatccgccgagggacaggagaccgtggattttcccctcttcggcaagcttggatgcaataatcgaagcgccacggcccatgacatccatcatttcgccacggttatgacgtgttcggatgtcacttggcgactcgcctgcggcacgaatgacctcatcggacgtgtagtcggctatacggctgttggagaatgagccaacatcgatgatgactacctgactgccgttggtaagaatgcggtgacgaagccagtcgaactcgtctcccttggtatccaaagttccgagcaaagctattgcggccatgaacactccttcgtgatcgtgtcatcatgaccgtagttcggtgattctgcctacaccatgccgtttgagacgaattggcctgtacgttgtatcgctggttgtgaagaagggcaatacttcaggtgtggttgtcaaggttgaccctgcaagtctgagccggatgctgggggagtggagccagcccggagaagcgcttccggaagcgttggcggacgcattgctggatctcattgacgctggttttgtgcccgctggtgcggttcttccaccccaacgagcatgcgccgcgacactgcaagtatctcggcaaaccgtggcggaggcatttgggattcttgaagccgcaggccacattgcggcgttggttgggtcagggacgcgggttagatcaggccgcgctgcagtgagtactgatggcaggttgttctcgttcagcgaggctgcacctggcctgatcgacctgtcaacgggggcgctacctgcgtcagaggtggtgcgaagagtgcggctagaagaccacgtcgacttggatgagtatttcgataccgacggatatttcccggctggactacctatattgcgtgcagccatcgcggaacggctcactcgagatggagttcccacagtcccgcagcagatcgttgttaccaacggcgctcagcatgcgagttatcttgcctctcagctcctggtctcggctggtgacaccgtgttggtggaggagccgacatatcggggtgagctcgcagagctgcgactgatgggcgcccgtgtgaagagtgtccc

SEQ ID NO: 59 - DNA, 11477 bp, Propionibacterium acnes
  source 1..11477: mol_type = genomic DNA
gggccgctccggaaccgtgtatggcgtctggctccagtaacgcggccaagcggtggcagcaggtcgagatcaccgcgttggacccgtttcgcgattacaagcacgctatcgatgatcacctcgataacgccacagccgtactgagtcccttccacgtcgtgaaacttgccgcccaggccctcgacgaggcccgacgccgggtccaacaagccccctcaggcaaccgcggccggactagcgacccgctctacggcattcagacgatcctgcgagccggggccgagaacctgtccgacaagcaaaaacaccgtcttgccaccgtgatcgacgctaacgaggcacacgagaaaatgttcattacctggcacaagcagcgtaacggctccgggccgtcaacagaccgatcgaactctaccgccgcatcgcccgtggctccagcaactgcgacaactaccgcctactccgctgctcatcgccgggggcaacacacacgaaccaccgccaagtcagacgagccatttatagcccaacagctatttgggtgatctcctcagtctgacagcgccagacgtcggtccgccatgctaagctgagcgcgtcgcttaagcttcgggaatagaaatgggaaacggtatgactcaaatacttattcaaatactcccggaatagacattcttgcggcgcgctccgctctaatcatttcgtggccgcctctcctacgacgaattgtgcattagggaagtacagtgcatctcagtccatatgtagtctttcgcaggacacgactcgcctactctcaacttcagagcagctccttcgacgcactctggcagcaagtgcaagaaatggtcgataagcatgcgcaattagaggttcagaccagcaggcttacggcacacctggagtctgttatttcagtaactgcgcctcgtgacagatctcgactaatcacattaaaacgtgacgtgcataacatgcgcgtggaaaaagtgaagcaaagactactgcactgtcagggctgcacggctagcaacattatggagcctgtatctagttggatcgatacatgtcgatcatacgaaatacttgagcgtcggttgagtcaagtatatgcggacagccgagacgaagtgtctcgtcactacaggtccctctaccaggctgacgcaatagagccaagcattcaactctcaggtggccagctccacagtgacctgacgcgtctgattagccacggttctaggataaaacccactaaagagcggactctggaaacgactcttgtaaactatctctacagggcagcaacaaagccatcacctttcggtcgtttcgtggaagtaggggccttcgacccgtctcaaccaaattccgaacctcgacgctgcagtgaatccagcgtgacgacaaaccggattcttaccagctggctcactgcagtaacagcgcgttctttcgccgcaccagaaatgcttgctatcctcaacagcaccctgcgcgttaaacgcgatataatccagttcattggaattccacctggggagtggcgaggtgcaccgagcattcccgaggagcgcctgctaactatccgcaagcgcgaagatatgatgtctgttcttaagctcctaatgggcggcccaagatcagtcggtgacctcattattgcccttaatgaccaaggcatagatgaatcacacgcaactaatcttctcagcagtttgagtacagcagggataatcttctttcggctcccagtagatgaccatgacgtacactatgtacagactgcgtgtacagcgctaaggttaaccaaagatgagtcacttcgtgccgctttccaaagtctggcgaacgctgaaaaggagttccccacagcgtcagtcgccacgcgtcacgaccttctcctcagcatcaaggattccgtgaatactgtcgcgtcggcacatgatgtgccggccccaccggacagcgtactcaagagccctttgtatgaggacctccccgccaccgcggcaccccagacatgggattcgaacacggttgagagatcagcccgcgcactcaggagcatctggctactgagcgatttaatggatagctttcaacgccgacagttgggcctctcccagttcatagcagacatgaataatggcgcgccagttacttttctggatttcttcgactcgttttcgcgccttagcattcgtgagcgccaaggaatcctgcgcggagaaaactcaccgcaaatcgcccgtttcgctcagcaatatagtgaagcattgcttaaaattcgcgatgccgttaactacacgcaggacgaagcccaccttgaatctcaggtaattctcgatgcgatcaccaatattgatgatttccgaccgactaagtcggtcacaattcgaggacaattcacaacatcgctcacctcccatataagccaactgataatcaacggtgttatgacgggatacggtacatacatgtcccgattcgcaacatttgtaaacccatcaggtacttggagtctagtcgacgggattcggagacatctatccgatcattttccaggtcaatgtgatttgaattccgtactgggattcaacttcaatgttcatccgcaaatgacagcacatagtatcgcctatcctggagtagtttctgtgcttaatggtgccaagacacattcgattcaggatttaatactgattccaactgctgaagcaggtccgcgccgcgtcgctatctttgatagagcagagaacgaacttatcgacctccagcccatgaatttcatggttccttttggggtgcctttgctgtatcggactctagagttcctgtgcccatcgaccagatacctatggaacccagctcaagaccttctggatatcccaatgatagagaacagttgccctcggatttactttgacgacgtagtggctcaacgccgttcctggacgtgcagcgccgagacgctcccgtgtcccccagagaaactctttaggggtgatcttgctgctttgcaagccttcgactcgtggagactatcagcgagggtacccagacatgtctttgccctagtacaaacggctacggaaagacaaattttttccggagcggccgacgcgccaaccttgctctccgaatacaagcatcttcggagagcaagtgtgcataagccaatctacctggatctacgaaacccacttctagtccgttctctcgcgaaggtgatcatgtccaggcccgaactatatgtcacgttttccgagttcctcccatcggaggccgattacacgcagaacggaagctgccccagttacgcagaggagtacttcattgaactgtgtgccgagtgacagcgcaagcatgtctgatcctggcggctggcgggcgctccatattcacttgcctccctcggtgcagtccgagtacctagctgacgtgattcttccctcgatgtcagccttgatgccagaacatgactacttcttcctccgatattggcaggggggatcacatctccggcttcggctccgtagcactcccgagcgccccctagatgatgaggctatcaacgaggttgcatgccatctccgtagccttctcccggcgttgtcagaccaaaagcgcgcggagtaccgctattcgcaatcgcttcaggatcagttagccgaaatggaaagggctgattgccttcccctagaggcggttgggaccgtggtagagcgccggtaccagcctgaatatagaaagtatggcggatcggtcggagtatccattgcagaggatgttttctgtagtactagccgatctgtccttcgcattctgagtgagcgaccaactagccaccgacagcccttggggtacgcttgccaggttttcatccagatgctgggctgcttagggctcgcaacttcgcaggttgaccagttcctcaccagatatgcgcagtggtggaccccttactcaatggccgctcgccctgagatcttagcggcgcgtctctacgccaacttgtcaagcgtggtggcggacctatgggccgcaagtgagcccaacggaatgttctcggttccggctctcaatgcttatacccaatggtcacggcgacggtcgtccgcgagaaataccagcgtaaagatagacccaatgtttctatcttgcttagcgaactacattcacacaaccaataaccgacttgggctcccacccgccctagaatcgacagcggcatatcttgtccaacttggattccgatcggtggctgtcaggggggagaaagtgcgatgaatccaaaaaactccaaagtgacggaactttggtttccagataattcagactcgccatgtactcttcttctcgacttatctcgggcctccgctgagggcactgagcctagtcctcaatactactgtcgaacttgggacccaacaacaaaagatcccggagtaagggttggcatacttgatcccaaccgcttaactcatcaaacggctttccttggcggttccggtattacgcatcacttcttggtaatggaaaaaccacccagctggcctcttctatggaacgcgggtttcgcgggcttgaagctttccacgataagcaaacaattgttcaccgcgtcatatccatggatggtaaagtgggcgctacaggcatcggcttggacggacgacgaacgccttctggctcttacgaaacttctagttgcccacgctgatgcaagccttccaccggtcgataagactgaaatgctcggccgcctccctttgaagttgagcttgcgactgatcacatatcgttcccactacgaaagcatccgcgctcgcacgattgacccgaaagcgatggatactgcggttaatcgggccttcatgaagtatcaagacgagctcctgcgatggtcccagtcgttgacatgctcgtcgagctatcgtgagaaagaatggagtaatcccaacctttcagaatggagcgccatcatttattgccatctcccacaaattaggcaactcctcagcgggggaggattaactgtcgcgggcccgacacgcgaggatatagaagcctccttaggtcacagtattcctgatacacgatttcacgagcgtcttgaccccgccatgcagtattatctcaatcatgaccaagacttcacggcatacagattctgcacgggttttttgtacagcaacctgtactcgctaggaataccgttgaggctgcgctaccttgtctgtgggttggcagcacgtttcaacgaggagctgtcggacacgacttggcgcgatttacgggatctcttccacgaggctgctactgttgcatattacacacgcgacacagacgggagcgggattagataatgacagttgagcgtcagcctctgcgggagcgtgcaaggagcctcgtttcaccatacggactagtttcccaagtacaccctctgcacgccaatgaagcagatccaccgtttcatgtgcatttgggtcgaacaggccactcaatacacgaggggcaaattacttttgagggagatatcggaaacaccgacggggcagggtcgggatccgacagtaccacggcagaatttattgcagtaatggagtccttagagcgctactccagcgcaatgtgggacgctcgttcctttttgctggaatcggaaaataatctgcaggagcgacttgtatctcccaaccaattcccacgctgttctacagccgagctagattctggacatgtactcaggcggtacgacccgggcgtcccaatacgatgggtcagaggatggtcactgacttcaggtcatcaggtgtgggttccggcgatcgcggtttatctgcatctgccgtacttaaacgactctgaacgattcatacgttcagtctcgaccggatgtgcggttcatgaatccatgcggaaggctgttcttaacggtcttttagaagtcgtcgagcgagatgctattgctttgacttggttgcatgagttgcccttgcccagaatcgcggctagcgaggccggtgagttcccgccggaagcgctagccagttggaagtcatatagggattacggaatcgagacccatctctttgacgcaacgacggattttgggattccggtgatctttgcgctccagatatcggatcaggatgacgacatcgctcagctcgtaggagctgcatccgctttggaacccgctgaggcgctgactaaagtattcagggaaatggcatcgatccgaatagcactacgcgcctttctcgcccagtccacatcgattaagatttaccccgatgtggctaacgtgacagggggtgccgccctcatgggccagcgcgcgtaccgagatgcattttccttcctccttaacagcgagcgcgaaacgtcaccgtcgcggatgcctaacctcctagagctgaatgatgatccactgcgcgagatgattattcgaatacgcctggctggcgctgaagttatcgccgtcgatatcacgacggacgaagcgaggtcagttggtgcaagagtagtgaaggttttggtcccagaggcggttccactctcctttgttcaccgagagaggtatttagatactcctcggctcatatccgcgcctaatagcatgggatatttggttgacacagcgcctacgttcaaccggaacattcaaccttttgcgtgaaactcatatcaaggaaggccagaccgactaatggaccgcttcgttgtgactcggacgctcttcggcgtggagctcgctaaagaactccagtcctccatcttagaggatgggccatacataggcgactcagttcctcactggaaacaaaatcaattactcgtgtacgtgacgacagatgaggcatccccaaggttggactcaattgacggcggggcgttctcagctggccggccttggctccccgtccgtcttcgacccacagtgattcactgcggccccataatttggccaggtagtacgccttgcttccggtgcagtgtgaaccgaatgaagcagcactctcccatgcctagtctcgtaggttcaggaccggagcttgcggaaggctatgcggcgtttcatgtcagacttatagcggcagcgatctcgttgctggaggagagattctctgagggggagatcttaggtaggggcttatcatttaatcttgtcaacgggtttcttaaccactatcctatcgtgcccgttgatcgctgtccgagatgcggtggccgtttcggtaaacgggaagatgagcaccaagagttgggctgcgtcgcacgggaggtgtgtcaagtatgaagggtataatcagtggtgaacaggtgggaaatgcagctcgctttgacaagcagttcagggtccctcgtcggccgagcaggcggctcggtgtcgatattgagatccgtgaggacgcaacaattctttggggatcagatcgtctgcagacatttacaggaggaatgaaaccttcactgattgaggatattttacgagcgtgcgacggaactaagacggcacgtgagctcgcctctgtatgtgatgttacggagcccttgatggacaagatagtggcccttctctgggtctcgggtgctattgaggaggcgggcccgaccgatgttgaaagttctccgcttggggtccttttgtctcgccttgggaacgcaactggggcgaatgctagctggcaggaagctcagcacagaattaacagcatgccgatctgtgttatgccccattcggaacttggaacggaggttgcgggcgcgcttgctggcacctttgaggttatcaatgaagaggcagcttttgaacgcggcgtggttctattcatctttatcgaaaccgcgtcgtctaagatcgaacagcatcacaaatttgatgaactgacaaagagaagagtgctattggttagcgctgcgggtgacgaagttgtagtggggccgctttatgaccaggctataacgccctgccttcggtgctgttcgtcatcgaggatcaagctggatcggggtgcctcgagcccggcgcagcttcgtctcatggctggaattgtctcgcatcatattgttgcgttggtaagcagggcgttactctcaccgctgcccacggattccttggcgctgaatgtggtcactggtgtccagcgctactctttcccggtgtccagaccgggttgccccgaatgttcgcatgcgatcccagctattgctagtgagccgacggtcggtgccgtgtacgaggcttccgtagcactccctccgcgagaattcgtgaatgtaagggactatcaagcccacttcttgagcgcaaatcaacaacttcaaacgaaatttaagtcatggggaaaaagggaaaaattccctttgcctgacattaatatttcagacctacatatacagattgacgaccttctttttttagctgctgcccttaggtttgggttcggaatagacccggagcggaccacttcaaaaatagcgaagcgctggacggcctctggtggaaacattggctcggtaaacgcattcgtgagccttcctgcgatggtagggcacattcccagtgggatttatggatattcagttagcgatcattccctagccaaagttagtcaggagttgatttcggcgactgacatcatgattgcggcttctgccgacctacggaagatcgcttctaaatatgggacattcggcttgaggatcgcgattatggacgccgggtgtgccctttcaacggtgcgtcgtgtctgccgggaagtaggccgtacattttcgatgtggagcgctgacctcgacgctgggtctattagcgagatgctgcatctttcaagtgcgcgtgagcctattattggagtttcagtgctgggaaaggggcaacgagggtgaggacagacattcccgtaatgaatgccattctgtgtggaatttctggtttgaggccaagagttgcggagctccggctgaatcatgtaccaggagaacttgaaggtgacctgatcggcgagttctcggggccagttactccggatgaaggatcaccttgtctgccgtgcaagagcttccctgaattcttgcagacaaggaggtcggtatcccattttagagacgaggcggttgacgcacgctgcgtcatccatgcagtggctcaggctcttgaggatgatgagcgactgtgggggtgctcagagaccgctggtcttcttgaggcgtttgtctttgtgcttcgagatagtgttggcggtcctggacccgggatctatcaggtgcggcgcgattctgcggtgagaatgacaactgccgctgaacttggcgatccgattcgattcggtgttcaggaggaattcttcgcagggtcaggggtagttatcttttgcgcgaatctggacgtggaggatggcgccggaggagcaaacggatacttagttaatactctccgagcttccatggcactctacgaagtccatgttgaactcggttgcatggacgtggttggctccgttttcggaggcttcattccagcttcgctgcgatcgctcctgttggcagatatggttactcgtcagcaaatcatctcttgctcctatggttttccagcctaacttgctcgacccgccagtagctgggttgtgaattgggtaatgaatggatcgaaataatttgtaccatctgagtcgcgagaaggtaaatacaaatggaaatgaggcacttaatctcaatgtgatggagttctcggacatgattagcgacgctactgagcgcgacgacgtcactcagataatggcggcatcttgcgtcgagacgagtgtatcgtcgagttccacgtcatcttcatgatcgccaagtggcagattatggagccaggagaagaggtccgtacagggcgaatactcagacgcgacttagccttcgcagttgtcgtggaagtttatctagccgtcttaggttgtttcagcaaccctacacgggaagatactcttagcgctctggggtgggattatttggttcgccaaagcgattcaaggcttcctctctaggtggttatgattagtgtcgaaaccaattgaggggaggtgaacagaatggagaacgaaacgttggaccttgacgtgatggagctggccgatatcatcggtagtgcttctgatcaagacgacatggctcaggtcatggctgcgtcgtgcaccaccacgagtgtctcgacgagctcttcgtcgtcctcgtaacgagatgggcgggctggcgggtgcttttcgggcccgccggcccgttcctttgttatttacggttctttgcttgagcgggctgaatcgtggtggggaggttgtctaaaatttgggctcgggctcgaggccggccgcgtaaattgaccacaatgagcgtgctgcggtaacttagacgtaagatacgcttctcctgctagccttatttgttacccgtttggatttcacctagatgcacgctagggtaggctgattagcttttatggaaatgatattattattatgataattagtgtagatgggatttggaggggcatcgtgtagctagtctcaaatagaagcgatcccgcagtgcagcgtattttggatatgtccaggccttcgttcaagctggtttgatgtttttaaaggatgtggtgaccgttcacattgcgcatggctgccggtgtgcacattgttgagatgtattcggaggctggaaaggcagcggcttttttaattgacgcgtatgcaaccctgggggttccatatcgagaaatgtcatcattgttgttgtcgtaagtattcaaggtgggtaagcgccctgagattttcgctgttgatcgggtggcgcatgaggctaatgccggcgtaattgatccgaagctagatttggttgttttgaacagtttgcacaccgtcggtaatatgggggcgataatttagacctcctttgtgcttgactcaagggcttttgttctagtggacagaaacttgagctctatttccgataggagggttcttctggcttctcctagatacgtctttcttcttctggttctgagagctagtcgcgatgagcttcttgagttgtgcaccagtcgtcgggaactggtgaaattcttggcggatggctatgtggatatggcctttttctggtcttgagaccatccgatcacgatggtctagggaagcaaggataagggtgtgtcgataatttgattatcggatttccatctccgttagaattctgatgctggcggatgctaagtcattgaatgatgtgtctgtggcggtcggaattggactacatgagaggccgcagcgtgacttggagagcggatcttaggaatcagttcagggccaggactcccatccaggccatcagtttgttggcgaagctgacgatcagctgcccgatccagttctgtgtgaagccttttcaacgacagatcggtcaggctggtgtccttcgctgtc

SEQ ID NO: 60 - DNA, 11522 bp, Propionibacterium acnes
  source 1..11522: mol_type = genomic DNA
ggcccggctgttagacctgacactgggcagctccggaaccgtgtatggcgtctggctccagtaacgcggccaagcatagtggcagcaggtcgagatcaccgcgttggacccgtttcgcgattacaagcacgctatcgatgatcacctcgataacgccacagccgtactgagtcccttccacgtcgtgaaacttgccgcccaggccctcgacgaggcccgaagccgggtccaacaagcccctcaggcaaccgcggccggactggcgacccgctctacggcattcagacgatcctgcgagccggggccgagaacctgtccgacaagcaaaaacaccgtcttgccaccgcgatcgacgctaacgaggcacacgagaaaatgttcattacctggcacaagcagcgcaacggctccgggccgtcaacagaccgaccaaactctaccgcagcatcgcccgtggctccagcaactgcgacaactaccgcctactccgcctgctcatcgccgggggcaagacacacgaaccaccgccaagtcagacgagccatttatagcccaacagctatttgggtggtcccctcagcctgacagcgccagacgtcggtccgccatgttaaactgaacgcgtcgcttaagcttcgggaatagaaatgggaaacggtatgactcaaatacttattcaagtactcccggaatagacattcttgcggcgcgctcagctctaatcatttcgtggccgcctctcctacgacgaattgtgcattagggaagtacagtgcatctcagtccatatgtagtctttcgcaggacacgactcgcctactctcaacttcagagcagctccttcgacacactctggcagcaagtgcaagaaatggtcgataaacatacgcaattagaggttcagaccagcaggcttacggcacacctggagtctgttatttcagtaactgcgcctcgtgacagatctcgactaatcacattaaaacgtgacgtgcataacatgcgcgtggaaaaagtgcagcaaagactgctgcactgtcagggctgcacggctagcaacattatggagcctgtatctagttggatcgatacatgtcgatcatacaaatacttgagcgtcggttaagtcaagtatatgcggacagccgagacgaagtgtctcgtcactacaggtccctctaccaggctgacgcaatagagccaagcattcaactctcaggtggccagctccacagtgacctgacacgtctgattagccacgattctaggataaaacccactaaagagcggactatggaaacgactcttgtaaactatctctacagggcagcaacaaagccatcacctttcggtcgtttcgtggaagtaggggccttcgacccgtctcaaccaaattccgaacctcgacgctgcagcgaatccagcgtgacgacaaaccggattcttaccagctggctcactgcagtaacagcgcattctttcgccgcaccagaaatgcttgctatcctcaacagcgccctgcgcgttaaacgcgatataatccagttcattggaattccacctggggagtggcgaggtgcaccgagcattcccgaggagcgcctgctaactatccgcaagcgcgaagatatgatgtctgttcttaagctcctaatgggcggcccaagatcagtcggtgacctcattattgcccttaatgaccaaggcatagatgaatcacacgcaactaatcttctcagcagtttgagtacagcagggataatcttctttcggctcccagtagatgaccatgacgtacattatgtacagactgcgtgtacagcgctaaggttaaccaaagatgagtcacttcgtgccgctttctaaagtctggcgaacgctgaaaaggagttccccacagcgtcagtcgccacgcgtcacgaccttctcctcggcatcaaggattccgtgaacactgtcgcgacggcacatgatgtgccgaccccaccggacagcgcactcaggagccctttgtatgaggacctccccgccaccgcgacaccccagacatgggattcaaacacggttgagagatcagcccgcgcactcaggagcatctggctactgagcgatttaatggatagctctcaacgccgacagttgggcctctcccagttcatagcggacatgaataatggcgcgccagttacttttcttgatttcttcgactcgttttcgcgccttagcattcgcgagcgccaaggaatcctgcgcggagaaaactcaccgcgaatcgcccgtttcgctcagcaatatagtgatgcattgcttaaaattcgcgatgccgttaactacacgcagggcgaagcccaccttgaatctcaggtaattctcgatgcgatcaccaatattgatgatttccggccgactaagtcgatcacaattcgaggacaattcacaacatcgctcacctcccatataagccaactgataatcaacggtgttatgacgggatacggtacatacatgtcccgattcgcaacatttgtaaacccaacaggtacttggaacctagccgacgggattcggagacatctatccgatcattttccaggtcaatgtgatttgaattccgtactgggattcaacttcaatgttcatccgcaaatgacagcacatagtatcgcctatcctggagtagttcctgcgcttgatggcgccaagacacattcaattcaggatttaatactgattccaactgccgaagcaggtccacgccgcgtcgctatctttgatagagcagagaacgaaccgatcgacctccagcccatgaatttcatggttccttttggggtacctttgctgtatcggactctagagttcctgtgcccatcgaccagatacctatggaacccagctcaagaccttctggatatcccaatgatagagaacagttgccctcggatttactttgacgacgtagtggctcaacgccgttcctggacgtgcagcgccgagacgctcccgtgtcccccagagaaactctttaggggtgatcttgctgctttgcaagccttcgactcgtggagactgtcagcgagggtacctagacatgtctttgccctagtacaaacggctacggaaagacaaatattttccggagcggccgacgcgccaaccttgctctccgaatacaagcaccttcggagagcaagtgtgcataagccaatctacctggatctacgaaacccacttctagtccgttctctcgcgaaggtgatcatgtccaggcccgaactatatgtcacgttttccgagttcctcccatcggaggccgattacacgcagaacgggagccgccccagttacgcagaggagtacttcattgaactgtgtgccgagtgacagcgcaagcatgtctgatcccggcggctggcgggcgctccatattcacttgcctccctcggtgcagtctgagtacctagctgacgtgattcttccctcgatgtcagccttgatgccagaacatgactacttcttccttcgatattggcaggggggatcacatctccggcttcggctccgtagcactcccgagcaccccctagatgatgaggctatcaacgaggttgcatgccatctccgtagtcttctcccggcgttgtcagaccaaaagcgcgcggagtaccgctattcgcaatcgcttcaggatcagttagccgaaatggaaagggctgattgccttcccctagaggcggttgggaccgtggtagagcgccggtaccagcctgaatatagaaagtatggcggatcggtcggagtatccattgcagaggatgttttctgtagtactagccaatctgtccttcgcattctaaatgagcggccaattagccaccgacagcccttggggtatgcttgccaagttttcatccagatgctgggctgcttagggctcgcaacttcgcaggtcgaccagttcctcaccagatatgcgcagtggtggaccccttactcaatggccgctcgccctgagaccttagcggcgcgtctctacgccaacttgtcaagcgtggtggcggacctatgggccgcaagtgagcccaacggaatgttctcggttccggctctcaatgcttatacccaatggtcacggcgacggtcgtccgcgagaaataccagcgtaaagatagacccaatgtttctatcttgcttagcgaactacattcacacaaccaataaccgacttgggctcccacccgccctagaatcgacagcggcatatcttgtccaacttggattccgatcggtggctgtcagggaggagaaagtgcggtgaatccaaaaaactccaaagcgacggaactttggtttcagataattcagactcgccatgtactcttcttctcgacttatctcgggcctccaccgagggcactgagcctagtcctcaatactactgtcgaacttgggaccctacaacaaaagaccccggagtaagggttggcatacttgattccaaccgcttaactgatcaagcggctttccttggcggttccggtattacgcatcacttcttggtaatgaaaaaaccacccagctggccccttctatggaacgcgggtttcgcgggcttgaagctttccacgataagcaaacaattgttcaccgcgtcatatccatggatggtaaagtgggcgctacaggcatcggcttggacggacgacgaacgccttctggctcttacgaaacttctagttgcccacgctgatgcaagccttccaccggtcgataagactgaaatgctcggccgcctccctttgaagttgagcttgcgactgatcacatatcgttcccactacgaaagcatccgcgctcgcacgattgatccgaaagcgatggatactgcggttaatcgggccttcatgaagtatcaagacgagctccagcgatggtcccagtcgttgacatgctcgtcgagctatcgtgagaaagaatggactaatcccaacctttcagagtggagtgccatcatttattgccatctcccacaaattaggaaactcctcagcgggggaggattaactgtcgcgggcccgacacgcgaggatatagaagcctccttaggtcacagtattcctgatacacgatttcacgagcgccttgaccccgccatgcagtattatctcaatcatgaccaagacttcacggcatacagattctgtacgggttttttgtacagcaacctgtactcgctgggaataccgttgaggctgcgctaccttgtctgtgggctggcagcacgtttcaacgaggagctgtcgggcacgacgtggcgcgatttacgggatctcttccacgaggctgctactgtcgcatattacacacgcgacacagacgggagcgggattagataatgacagtcgagcgtcagcccctgcgggagcgtgcaaggagcctcgtttcaccatacggactagtttctcaagtataccccctgcatgccaatgaagcagatccaccgtttcatgtgcatttgggtcgaacaggccactcaatacacgaggggcaaattacttttgagggagatatcggaaacaccgacgaggcagggtcggggtccgacagtaccacggcagaatttattgcagtaatggagtccttagagcgctactccagcgcaatgtgggacgctcgttccttcttgctggaatcggaaaataatctgcaggagcgatttgtatctcccaaccaattcccacgctgttctacagccgagctagattctggacatgtactaaggcggtacgacccgggcgtcccaatacgatgggtcagaggatggtcactgacttcaggtcatcaggtgtgggttccggcgatcgcggtttatctgcatctgccgtacttaaacgactctgaacgattcatacgttcagtctcgaccggatgtgcggttcatgaatccatgcggaaggctgttcttaacggtcttttagaagtcgtcgagcgagatgctattgctttgacttggttgcatgagttgcccttgcccagaatcgcggctggcgagaccggtgagttcccgccggaagcgctagccggttggaagtcatatagggattacggaatcgagactcatctctttgacgcaacgacagattttgggattccggtgatctttgcgctccagacatcggatcaggatgacgacatcgcacagctcgtaggtgctgcatcagctttggaacccgctgaggcgctgactaaagtattcagggaaatggcatcgattcgaatagcactacgcgcctttctcgcccagtccacatcgattaagattgactccgatgtggctaacgtgacagggggtgctgccctcatgggccagcgcgcgtaccgagatgcattttccttcctccttaacagcgagcgcgaaacgtcaccgtcgcggatgcctaacctcctagagctgaatgatgatccactgcgcgagatgattattcgaatacgcctggctggcgctgaagttatcgcggtcgatatcacgacggatgaagcgaggtcagttggtgcaagagtagtgaaggttttggtcccagaggcggttccactctcctttgttcaccgagagaggtatttagatactcctcggctcatatccgcgcctaatagcatgggatatttggttgacacagcgcctacgttcaaccggaacatccaaccttttgcgtgaaactcatattaaggaaggccagaccgactaatggaccgcttcgttgtgactcggacgctcttcggcgtggagctcgctaaagaactccagtcctccatcttagaggatgggccatacataggcgactcagttcctcactggaaacaaaatcaattactcgtgtacgtgacgacagatgaggcatccccaaggttggactcaattgacggcggggcgttctcagctggccggccttggcttcccgtccgtcttcgacccacagtgattcactgcggccccataatttggccaggtagtacgccttgcttccggtgcagtgtgaaccgaatgaagcagcactctcccgtgcctagtctcgtaggttcagggccggaacttgcggaaggctatgcggcgtttcatgtcagacttatagcagcagcgatctcgttgctggaggagagattctctgagggggagatcttaggtaggggcttatcatttaatcttgtcaacgggtttcttaaccactatcctatcgtgcccgttgatcgctgtccgagatgcggtggccgtttcggtaaacgggaagatgagcaccaagagttgggctgcgtcgcacaggaggtgtgtcaagtatgaagggtataatcagtggtgaacaggtgggaaatgcagctcgctttgacaagcagttcagggtccctcgtcggcccagcaggcggctcggtgtcgatattgagatccgtgaggatacaacagttctttggggatcagatcgtctgcagacatttacaggtggaatgaaaccttcactgattgaggatattttacaagcgtgcgacggaactaagacggcacgtgagctcgcctctgtatgtgatgtcacggagcccttgatggacaagatagtggcccttctctgggtctcgggtgctattgaggaggcgggcccgtccgatgttgaaagttctccgcttggggtccttttgtcccgccttgggaacgcaactggggtgaatgccaactggcaggaagcgcagcgcagaattaacagcatgcagatctgtgttatgccccattcggaacttggaacggaggttgcgggcgcgcttgctggcacctttgaggttgtcagtgaagaggcagcttttgaacgcggcgtggttctattcatctttatcgaaaccgcgtcgtctaagatcgaacagcaccataaatttgatgaactgacaaagagaagagtgctattggttagcgctgcgggtgacgaaattgtagtggggccgctttatgaccagactataacgccctgccttcggtgctgttcatcatcgaggatcaagctggatcggggtccctcgagcccggcgcagcttcgtctcatggctggaattgtctcgcatcacgttgttgcgttggtaagtagggcgttactctcaccgctgcccacggattccttggcactgaatgtggtcactggtgtccagcgctactctcccccggtgtccagaccgggttgccccgaatgttcgcatgcgatcccagctattactagtgagccgacggtcggtgccgtgtacgaggcttccgtagcactccctccgcgagaattcgtgaatgtaagggactatcaagcccacttcttgagcgcaaatcaacaacttcaaacgaaatttaagtcatggggaaaagggaaaaattccctttgcctgacattaatatttcagacgtaaatacacaggttgacgaccttcttttttggccgctgtccttaggtttgggttcggaatagacccagagcggaccacttcaaaaatagcgaagcgctggacagcctctggcggaaacaattggctcggtaaacgcattcgttagccttcctgcgatggtaggacacattcccagtggggtttatggatattcagttagcgatcattccctagccagagttagtcaggagttgatttcggcgactgacatagtgatcgcggcttctgccgacctacggaagatcgtttctaaatatgggacatttggcttgaggatcgcgattatggacgccgggtgtgccctttcaacggtgcgtcgtgtctgccgggaagtaggccgtacattttcgatgtggagcgctgacctcgacgctgggtctattagcgagatgctgcatctttcaagtgcgcgtgagcctattattggagtttcagtgctgggaaaggggcaacgagggtgaggacagacattcccgtaatgaatgccgttctgtgtggaatttctggtttgaggccaagagttgcggagctccggctgaatcatgtgccaggagaacttgaaggtgacctgatcggcgagttctcgggtccagttactccggatgaagtatcaccgtgtctgccgtgcaagagcttccctgaattcttgcagacaaggaggtcggtatcccattttagagacgaggcggttgacgcacgctgcgtcatccatgcagtggctcagggtcttgaggatgatgagcgactgtgggggtgctcagagaccgctggtcttcttgaggcgtttgtctttgtgcttcgagatagcgttggcggtcctggaccggggatctatcaggtgcggcgcgattctgcggtgagaatgacaactgccgctgaacttggcgatacgattcgattcggtgttcaggaggaattcttcgcagggtcaggggtagtcgtcttttgcgcgaatctggacgtggaggatggcgccgaaggagcaaacggatacttagttaatactctccgagcttccatggcactctatgaagtccatgttgaactcggttgcatggacgtggttggctccgttttcggaggcttcattccggcttcgctgcgatcgcttctgttggcagatatggttactcgtcagcaaatcatctcttgctcctatggttttccagcctaacttgctcggcccgccagtagctgggttgtgaattgggtaatgaatggatcgaaataatttgtaccatctgagtcgtgagaagataaatacaaatgaaaatgaggcacttaatctcaatgtgatggagttctcggacatgattggcgacgctactgagcgtgacgacgtcactcagatgatggcggcatcttgcgtcgagacgagtgtatcgtcgagttccacgtcatcttcatgatcgtcaagtggcagattatgaagccaggagaagaggtccgtacagggcgaatactcagatgcgactgagccttcgcggttgtcgtggaagtttgtctagccgtcttaggttgtttcagcaaccctacacgggaaggtactcttagcgttctggggtgggattatttggttcgccaaagcgattcaaggcttcctctctaggtggttatgattagtgtcgaaaccaattgaggggaggtgaacagaatggagaacgaaacgttggaccttgacgtgatggagctggccgatatcatcggtagtgcttctgatcaagacgacatggctcaggtcatggctgcgtcatgcaccaccacgagtgtctcgacgagctcttcgtcgtcctcgtaaacgagataggcgggctggcgggtgcttttcgggcccgccggcccgttcctttgttatttacggttctttcttgagcgggctgaatcgtggtggggaggttgtctaaaatttgggctcgggctcgaggccggccgcgtaaattgaccacaaggagcgtgctgcgatagcctagatttaagataaacttttcctgctagccttgtttgttacccgtttggatttcacctagatgtacgctagggtaggctgactagcttttatggcaaagatattaccattatgataattggtgtagatgggatttagaggggcatcgtgtagctaatctcagatagaagcgatcctgcagtgtagtgcattattggatatgtccaggccttcgttcaagctggatttgatgctttttaaaggatatggtgaccgttcacattgcgcatggctgtcggtgtgcacattgttgagatgtattcggagactggaaaaggccgcggctttttcaattgatgcgtatgcgaccctgggggttccatatcgagaaatgtcatcattgttgttgtaagtattcaaggtgggtaagcgccctgagattttcgctgttgatcgggtggcgcatgaggctaatgccggcgtaatcgattcgaagctagatttggttgttttgaacagtgtgcacaccgtcggtaatatgggggctataatttagacctcctttgtgcttggtacaagggcttttgttctagtggacagaaacttgatctctattttcgataggagggttcttctggcctgtcccagatacgtctttcctcttctggttctgagagctagccgcgatgagcttcttgagttgtgcaccagtcgttgggaactggtgaaattctcggcggatagctatctggatatagccttgttctggtcttgagaccatccgatcacgatggtctagggaagcaatgataagggcgtgtcgataatttgattatcggatttccatctccgttagaattctgatgccggcggatgctaagtcattgaatgtgtctgtggcggtcggaattggactatatgagaggccgcagcgtgacttggagagcggatcttaggaatcagttcagggccaggactcccatccaggccatcagtttgttggcgaagttgacgatcagctgcccgatccagttctgtgtgaagccttttcaacgacaggtcggtcaggctggtgtccttcgctgcccagtgtcaggtctaacagccgggc

SEQ ID NO: 61 - DNA, 2881 bp, Propionibacterium acnes
  source 1..2881: mol_type = genomic DNA
gccccacctcaggcccgaagagccagacaactcttgttgaacttcaaagccttgaaatcttcggtctgctttttaatgctggtctctgccgggaatcgctcgatggaagacgcgccgtagaagcctacgatgccatcggtgtgatcgagaatgtattgcgcatcctcgggattggcgatggggccgccatggcatagacataggatgtcgggattgacagatttggcagcgtcggcaagttcttgaaccttgacagcggcgtcctcgatagtgagtgctgtttttgcaccaatggttcccgaggtcggcagacccatgtgggggacgaggatgtcagagcccgctcgggccatgtccttggcctggtcgacatcgaaaacatagggtgaggtgaggagatcaagatcgtgggcaattttgatcatgtcaatctccaaaccgtaccccatgccagtttcctcaaggtctgcgcggaatgtgccgtcgatgagaccaacggtagggaagttctgaactccggcgaaccccgcgtccttgatctgggttaggaactgaggcatcaccctgaaaggatctgtgccattgactccggcaagaactggggtgtgcttgacgatgggcagcacctcgcgcgccatgtccatgacgatctcattagcatcgccgtaagcgagaagtcccgagagggagccacggcctgccatccggaaacgtcctgagttatagatgacgagcagatcgataccgccggcttccgcggatttagccgtaatcccggtgcctgcgccgccacccaccagggggattccgttggagacctgttcgcggaactttttcaggatttcagtgcgggtcatgatgctattcctttccgattagttatggatgatgagctcgtgaagagcccgcgccattgcttcgccaaaaccagtatcattgatattttgttttcgctcagtcacagtgatgtcggtatccttcagtccctctcgaatggcgttgaacaaagcgtcatcggcttctggatcatagaaatcttcacctggggtatctattccggagaccccagagtaggaatgaaaacttgagtcgggtcgcgcgcagcggccgcctttatggcgattctgtgaccaagctcggccatttcggtgtcgctcgttcgcatgagcgtcaccgctggattgtggatatgcaacgtgcgagaggaatagcgctccggaacagtgtcgacagggccgaaattgaccatgtcaagcgcgccaagactgatgacttcgggtattccaaggtctgctgcggcttccatccggcggggtcctgccgagagaactcctccgcagaggtcgtcggcaagctcggtagtcgtcaggtcacatattcccgcgagtagcccagatgatgcgagcttttccatcgccttcccaccggaaccagttgcgtggaagacgagaacctcgtacccaaggtctgtcaacgtcctgcgggcttcgtccgcagcgggtgttgtcaatccggtcatcgtcaggccgatgaccggtttgttgtgagcggtgttgctgacgattccagcgtcttcgtaccctttggccatggctgcgatagcggcggctgcattggcgaagaccatgcgcgacacggaattgatgccggccacgtcaacgacggagtacataagtgtgacgtcggcctgtcccacataggggctgacatccccggaagccatggtggaaaccaggagcttggggaatccaatcggcaatgcctgcatgaccgaagccgctacggatgatccacctgatccgccgagggacaggaggccgtggattctcccttcttcagcaagcctggatgcaataaccgatgcgccacggcccatgacatccatcatttcgccacggttatagcgtgttcggatgtcacttggcgactcgcctgcggcacgaatgacctcatcggaagtgtagtcggctatgcggctgttggagaatgaaccaacatcgatgatgactaccttgccgccgttggtaagaatgcggtgacgaagccagtcgagctcgtctccctcggtatccaaggttccgagacagcaattgcggccatgaacactccttcgtgatcatgtcatcatgaccgtagttcggtgattctgcctgcaccatgctgcttgagacgaattggcctatatggttgtaccgctggttgcgaagaagggcaatacttcaggtgtggttgtcaaggttgaccctgcaagtctgagccggatgctggggggccagcccggagaagcgcttccggaagcgttggcggacgcattgctggatctcattgacgctggttttctgcccgctggtgcggttcttccaccccaacgagcatgtgccgcgacactgcaagtatctcggcaaaccgtggcggaggcatttgggattcttgaagccgcaggccacattgcggcgttggttgggtcagggacgcgggttagatcaggccgcgctgcagtgagtactgatggcaggttgttctcgttcagtgaggctgcacctggcctgatcgacctgtcaacgggggcgctacctgcgtcagaggtggtgcgaagagtgctgctagaagaccacgtcgacttggatgagtatttcgataccgacggatatttcccggctggactacctatattgcgtgcggctatcgcggaacggctcactcgtgatggagttcccacagtcctgcagcagatcgttgttaccaacggcgctcagcatgcgagttatcttgcctctcagctcctggtctcggctggtgacaccgtgttggtggaggagacgacatatcggggtgagctcgcagagctgcgactgctgggcgcccgtgtggagagtgtccc

SEQ ID NO: 62 - DNA, 10252 bp, Propionibacterium acnes
  source 1..10252: mol_type = genomic DNA
cccgctcactgccaacgagacatcacgcagcagcggccgaccatcggccagcgtgtacgtcaccgacgcgacatcgagacgaaccatgacccaaaagtatcacacgtgtgataaatggaggttgagtatggcggcctgttcacttgatcaggcatttcttttagtgaggcctggggcgtaaccacttgtctgcaccttagagctgccacgcctcttgcagatcgaggcagaggaggctgcgcgggggtcgtggcgtgcggtggcggggtttgatgtcacgttcagtgtgccgaagtcggcatcggtgttgtgggcggttgcggacgcggggacgcaggcgttgattgcgcaggcccatcatgagacggttgtggcggtggttgcattcatggagtgcgaggttgcagccatccgcacgggtgcaactgctggggatggcgcggttgcacaggtcgacgtgacgggtttgatcacttcgattcccgcgccggggacccgcacttgcatacgcatgtggtgatcagcaacaaggcccgcacggtcctggatgggaagtggcggagtttggatgggcgttcgatgcatgccgcggtcttggcgctgtcggagctgcacgaggccgtgttcgccgatcacatgacccgcacgttcggtgtgacgtaggagccgcgggagatgggccaggaccggaacccgtcgtgggcgatcaccgacgtccccgaacagctggtggcagagttctcgacccgcgcccggcacatcaacgaggcgaccgacgcgctggttgctgactacgtggcccagcacgggaagcgcccttcgccggcgaccatcatgaaactgcgcgcccaggccacgctcgcgacccgtccggagaagcaggtccgctcacttgcggagctaacagccgagtggcgcactcgtgtcagccagcagctcggtgtggatgccaccgtgtgggcgcggaccgtcacgggtggggagcggcagttgctgttgcgggctggtgatgtgccgttggatctgatcgaggggtggggcggtctgtagtcgagatggtcggtgagaagcgttcgacgtggcggtgctggaacctgatggccgaagtcgcctgccagactgtggggtggcgtttcgccaccgttgaggaccgcgaagtcatcaccgcgatggttgccgacgcagcggaacaggcgtccttacgcctgaccccacccgagctagcgaccagcccggcgaagttccgccgcccggacggcactagcgtatttcgtccgaagcactccacggtgttctcctccgacagcctcctggccgcagaggaccacctcctgcaacgggcccgcaccgcgaccggtccgactatcgacctgaccaccgtggggaccatcacgagcaaggcggacagcgagggtcgggtgctcggtcccgatcaggccgcagctttggcgtcggtcgcggtcccgggccgggtggtggatgtgttggtggggccggcgggggctgggaagactgcagcgatgaacgcaccgcgccgggcgtgggagacggagcatggtgccgggtcggtggtggggttggctccgtcggcggtggcggcccaggtgctggccgatgatctgaggattgccacggagaacacggcgaagtggtggaccacccaccaacacaccggcgtcactttcaaggctggtcagctggtcatcatcgacgaagcttccctcgctgagaccctctctttgaatcggatcacgctggctgctgaggaggcggggacgaaggtgctgctggttggcgactatgcccagctcccgtccgtcgatgccggtggtgcgttcagcctgttgatccacgaccgccacgatgcccccgagctggtcgatgtccaccgcttcacccacgcctgggagaagaccgcatccctggagctgcggcacggccgcaccccggtcatcgacacctacctggcacaggatcgcatccacgacggagacgccgaggccgtgaccgctgccgcttacaccgcctggcgccacgaccggcagcaggggttggcgtcagtactgatcgccgaaacccgcgagaacgtcaccgccctcaacatccacacccgcgctgacctcatcctggacagcacgttgaagcctggccccgaaatcaccctgtccgacgggtccatggcaggcgtgggtgacacgatcatcacccgccgtaacgaccggcggctgcggaaccggcacggctgggtccacaacggccaaacctggaccatcactgccgtgcgtgacgatgggtcggtcacgatccgcccacccagtgcccggttcggcaacagcatcgtcctacccgccgactacgtggctgagcacgtcgacctcggctacgccgtcaccgctcaccgcgcccaaagcatcacaccgacaccgcccacgtcctcgtcgaacccacggcgacgcgggaaacctgtatgtggctatgacgcgcgggcgcgaatcgaaccgggcctacgtcatcctcgaccgtgccgacgaccacgccgccggcgccgtgtgccgtgtgaactcggtcgacagccccggacgctgggtcgcgcggtccgtgatgagttcgtcgacgtcggcagcggaggtaaccaggcgtgcgtggccggtacggagcagctcgtgcgcaccacggctggtgacaggccccggcaccgcaccgacctggcgtccgagctggtgggcctcggacgctacccgaagcgcccccgatcgcgcgccggcctcaacgaccaccgttgctgctgacattgcctccaaacagtcgggagcgggctaggagccgatgccgcgtcgacacggatccgggaggaagctcgctggccagcgcactcacatcacccacccggtccagcaagtcacggtggccgctcgggtcggggcggttcacgccaccgccaacaccgcacggtgcacagcagcctcgacaccattaagcgtcaccagccaccagtacacgctcacggttcgcgaggtcgccagccagctcggcggcgacatgctccccatacgcggaagccgcccgagaacccgtgaccgtcaccagatcgttccacggtcgcgccaagaacgacgccgcgccccgcacgaacagaataaacggagcgcggtcgcccagatcatccagcgcctgtggccagtgcgcgtcacccggaatcagagtggcgatcccgctctcctcgaccatgcgcagccgctgggcgagcccatccagcctgcccggtgaggtgaggtggtcacgccacacctgaccatcaactcgactcagaccaggcacggtggtcgtgtcggtgtcaagcagcccgagcgtctcaacggcacccaggcggcgcatcagcccgcccgtgacgggatcatcaggctccgccaacagcgccagcaccacccgggcacgacgttcatcaacaccaagcccagcaacaccagacatgacggctcctcctcgaacagacttcgccgaacaggtgcgccaacgcagcccgcaggtgtcgcgacgtcctcagcccgtggaggctggcgaacgcggtaacattcgacagtcgcacggttcggcagctcgacacagcagcgtgctggtgttgctttggaggagtccacgggcctcgccccccacaacggtgacttcaatcgacattgtcgttgttggtgatcgaggtgtcaccgcagctgcgaacgatagtcttgatctggacaacgatttcgatgcggaggaaagcacatgaggctcacacgcttcaaggtcgagaaccataggcggttggccgacctcgacattgaggtgcgcgaccaccttgtgctggttggagccaacgacgttgggaagtcctcgctgctccggtgcctcgatttgctgctcggggcgagtacggcgcagctctactcccgtatttcggccgacgatttccgagcccccgaccaaccgttcgtgattgaagggactctcgcggacttcaccgatgtcgacaaggctctgtttcccgatgagatccacgtcgacccgaacacgaatccttcgcgtctggtgattaggctcacggcgactgtggatgagaacgagacggtggtgatcagtcgttcggcccccgagggcggaacaggacgccagctctcacgggatcaggtgcttggcctgggatggaagttcctcagcgcaaccgcccagacccgcgaccttcgggaagaccgaaagtcggcactcgacgacatccttcaagctgtcgacttgggtgaagaggaggccgcgttcgaagccatcgcaaagagcctgacgaccaccttgggtagctctaaggtgcttgaaggcctccgaggttcacttgctgaccagctgtcgaaggctctgccggacaaggtggcacaggatgacttggcgttcgtgcctggagctgctgccgacaatgacgtcctcagcgacgtgcggctgcaagtcagcaagcaaggcgtggcacccgatctttccgaacagtcagacggcacgcgagcgctctacgcgatcgccctctacgatctgatgagcgtcggcgctaacatggtggggattgacgagcccgagatccatctacacccgagcagtcagcgaagcctcgcgcgcctcctgcggtcgaacgccaaccagaaggtcatcgctacgcattctgccgacatcgtaggagccttcgatccagattctattgtcgttgtgcggggcggaggcgaagccgttcaacccaaggctggattcctgtcggacgatgagcgaatggcagtacgcctgtgggtgagggatcggctcgaaccactcactgcacgtcgtgtcgttgtcgtggaaggcatctcagatcggatcatcctggagcacctggccgacctcaccgaccgaaatctcgaccggctcggcgtgtccttgattgaggctggcgggtgtggcgacatggggccgctcgacaagctctttggtgccaatggcttccgtgtatccatgtcgcaactcatcgatgcagatgcagaagaggcattggcaaagaaactgggagtcgaagttgctgaccttgcaggccgatccgtctgggtctcgcgaagcgacctcgaagacgagtacgttcgtgcgctcggctcggacgccgtgtggacagcactccagtcaaatggccacttctcgaagaatgaacttggcaactgcgcagcaagtgggccggctggcacgcgtaccgagatagatgttgctgccttctgtcgacgaaaggcgtacaaagtaaatgccgcgctatcagtcctgccgctcttcacggcggcgaatgccacgcaggtgtcgtctatcgagagtctactcgaagagatcgtggcgtagatggtcagcccgactcagaagcagattgacattagggacacgcgggttctcgatcttcttgtcgttgctcctgcgggatgcggcaagacggaagcgcttgcattacgaatccaaggacttcttcaccgcggcgatgtgactgccccaaagaagatcttggtgacaacattctcgaaccgagcccgcgacaacatcagagaacgattggggtcctacctgacgccttcggtaatgcgcgaccgcgttactgttgtgaactttcatggactggcagcccggttgatcagagcgcacggaaatgttatcggcctaagtgaggaactacgccttccggagaacgactgggttggcgagcaactccgccaacgcaacacctcctggaatgaccgaggagcgatccagaatgcgcttcgtgagacaaagcaacaacctttcagcgacgcagcggtcgaagctgaacttgaacgactcggaaatgtcactgcacttgaactggaacggctcagaaaggaagaaggacgcctcacctatgatgatctgccaagacttgccgagctgattctcggttacgagagcgtcgcggacctctacgcgacacacttcggcgctgtcgtggttgacgaattccaagacctgactccccagcaactccgaatcgtaaacagaatcggttacaagcgcacaacctatggcggtgaccttgtgcaggggatctatggttttgcaggagcgcagccactggcaattgatcgggacatacgtgccgagtgcacctgcgtgatcgagttctctgagtcgcatcgatcctcaccggcagttctcaggacggtcaacgcccttatcccgatcacgtcgggacaggtactcaccgcagccaaccccgactcctggccttcgggcgggctcaccgggacgatcgtgcaccaatcggcggaatcggaagctaagtgtatcgtgaaaattgcgcgagccatcctcggcagggctcccgggcatcggattggagtgttatcccgaacagcgccgcgtcgccgattcgttgacgcagccttcgccgcggcaacagatatacctcactacaggtgggatgacggcgtgttggacacagatactgccaaactcgtaaaggcaatgctcgcgaggtttgatgtcgccgcctacactgccgcgcccgacaaagtaactttccttcggatggcggttgactttgactcgatcactgatgtcgacacgcgcaagagcatggcggatgctctcggttgggtacaagatctgctgtctaaagcggtgaagccagagagcatccgtggacgcatcaaggttggcgattcagcgaccctcatcactagccctggagtccatctactgcgcggacacgtcggcaaagggcaacagttcgactgggtgattgtcgtaggccttgaaaagggctccattccgttcactatggctgacacatcagacgacgagatcgctgaggaagcacgagtgctttccgtgatgatctcacgcgctcggcacggcgtcattcttagccgagccaactcggttcggacgaacggggggcaccccatgagtcgaactccatcccagttcctcgaatggattgccactgccaatccactcgatgcgactgggatcatcgagtggttcaaagctgcggactggcgtgtaatcagtgagagatgaccaacgttctttggagagaagtgcgctgtccttgatgatgatccacctccgacccgcgcaaccttgggcgccggactcaccaggttgcagatcggatcagactggtaagcaagcgcccgtaaacctcgacttccctgaacacgggcccaggtcctattgaccccgttcagagagcacgagttcgtccagtcgcgctgcgcacccgatcccacgtcgtcagaaggtgagcggtagccagccagggtcatttacaaagcgctcagcgcgatctacagtagatagtaaggcaggttctcgtctcttgcgggtccatcgggacggcctacgggcgctcttccacgtactgtttcctcgacggagtagcacgtgtgacgagagagcccgatcatgttccgaaccatctggacgctcagcattcatgtcgatgactgtcttccagcactacatgccgagcaaccggctgctggcagctacgcgaactcggcgaggtgtgaagtggggtgtctcggcaatgctcgtcggcgtcccgtatctcgccatcgccaacgtgttcaactaccctgactgaccgttctgtggtgacgtgcaacggggtatcgatgttggtgtgcgcgaggacgttggttgtgggctcgttgtcgggtgcgtaggcggcgttctcgtcgttgtcaatagtgatgcgggtggatagggcacggttgaggattcgccgctcggctggcacgtacgttctcgactgtggccacggttagggcgaggtgtgctccaacggtgtcaacccctgggccaatgtgttgatgaggtcacggtgacgagtatgtggtcatggccgcacactccagattgatccggcaggcttccagggtggtgaacctcgttgaggggtccagctaagtacctaaggtcatggccaagcacgatcgcattcgctttgccgtgtgctctctttcggatcatcccggggagcacacaagatcgcccgaacaatggcgatcttgtgtacagtgactttgctagagatgttttcccaggaccgacagtgactgccagtgcgatgttcgaggtagtggtgaaactacgggtgtacaagatctgggtggccgtaaacgaggttgcctcttgggctcaggtcctgcctgacggaacccccctatctgagccctggccatgacgggtatgccttagtcaacgtggctgaagtgtcctgatatcgcagcatcagtgactagtttggtaactgtaatgccgccgcacccgttttacttactttcgatagaaagcgggtactctgtgcactttgcagggtttttgccttcgttgcttcccgtgcgacttactgtgtcttcttccttggggaggtgtaggggagggtagaatgttcgtggactagatcaacttaaccaacttacgggttgtaggttaacacctatctgtcaaccttgacactgtaatcccattgttcagcaggcacactgtcatacatctcactatctgtaaatgcagagcctgtggtttcaccaccaaagcctaactgccttaaatgtgcaatcccgttctgtgctccctccaaatcgatccgctccagtgtttcatcagcttcagaagcatagaggaacgtcacgctaacctacgatttggttctgggttgaatttttaggcgatctgatctgaagtttcgcgcgcctgcatagcccgatccgcaatctcgtccagcccgctgattatgtgatgcagctcacaagtagttagtaacaggacctgctccgcggcctggcctctatcggtgatcagcatgtgtccacggcatcttatccaccacgatgtcgcaatagttgcactgattctgacggcaccgccaacattcggtaagtgtaggataggacaagccttgagagtgtggatggaatgtgccaactctctcagtcctcaaagcatcagtggctagatcaacaaacatcgtaaacaggttgttctctcttatagcgatgtgtctatcgaagcagatgaacgagtcatctgccaggtatgaatgattgccatcactagtaacctctgcgtacggcagcaagacgttactgatgtttgagattaggagatccccaaaaatagatactcggagcgaaatagtatctatacctacgatgatgccgtgaacactactggtttctcaagcaaccagatccgcacatttaaaccatgtgaaacgtccggtaaacattctgctgtaagtcacccaggtgaccccttggagaaagttatttcagggctatggggctcgggggtgcgagaggattgttcgttgctcatttcggattatctttcagagatgagcaaccgcaatcggcattgaccagaagcgggtaaccggttgaccctagacagacttatgtttggtattcgtcaagcccccatcgggcgactggaacctgatcaattagatgatttgattgctattcttagaagaatagtttcctagattttatagcacttcccctaaacgtctaagtatgccctaaatcgtagctctaatgcagatgggcgggcgaggacgttccgggaagcatcgtcaagagtgtcgatgtcgcctgctctagctaagactcgctgcctaggaaaatcctgaacccaagtggctcggtattcgggggtgtagttcctggcgctatcggtgatgtccatagcagtcttggcggcggacgtgttcgttaagtcaataggactccagctggttttgtactcgtaatcttcaagatcaacatcgattcttagctcagtattgaggatctcgatcatgaaactcgaatcagagggaaaacttaactatcatatgcaatatcttcttaagaagagcgcttgccgactacgttatcaagcgatcccacgagcaccaatctggtatcggtaaaagtgttcgcttttctcggcggaaaatccccaaaatgcttggatatttttcttgacggatgaacttggagaagcgctgttctaatgcggcgtcacgccagacagtgtgcgcccggcatcgcccaagcctgagtgtccgaaacatgcttgatgcgtgtgaagcgttcctgcgaccaaggctcagcttgctggggatgctctaattacttctgctgctcgatagtatgcgtcctaggatagacgttgacttgagttgaggttgtctggctcttcgggcctgaggtggggcagc

SEQ ID NO: 63 - DNA, 10217 bp, Propionibacterium acnes
  source 1..10217: mol_type = genomic DNA
cccgctcactgccaacgagacatcacgcagcagcggccgaccatcggccagcgtgtacgtcaccgacgcgacatcgagacgaaccatgacccaaaagtatcacacgtgtgataaatggaggttgagtatggcggcctgttcacttgatcaggcatttcttttagtgaggcctggggcgtaaccacttgtctgcaccttagagctgccacgcctcttgcagatcgaggcagaggaggctgcgcgggggtcgtggcgtgcggtggcggggtttgatgtcacgttcagtgtgccgaagtcggcatcggtgttgtgggcggttgcggacgcggggacgcaggcgttgattgcgcaggcccatcatgagacggttgtggcggtggttgcattcatggagtgcgaggttgcagccatccgcacgggtgcaactgctggggatggcgcggttgcacaggtcgacgtgacgggtttgatcacttcgattcccgcgccggggacccgcacttgcatacgcatgtggtgatcagcaacaaggcccgcacggtcctggatgggaagtggcggagtttggatgggcgttcgatgcatgccgcggtcttggcgctgtcggagctgcacgaggccgtgttcgccgatcacatgacccgcacgttcggtgtgacgtaggagccgcgggagatgggccaggaccggaacccgtcgtgggcgatcaccgacgtccccgaacagctggtggcagagttctcgacccgcgcccggcacatcaacgaggcgaccgacgcgctggttgctgactacgtggcccagcacgggaagcgcccttcgccggcgaccatcatgaaactgcgcgcccaggccacgctcgcgacccgtccggagaagcaggtccgctcacttgcggagctaacagccgagtggcgcactcgtgtcagccagcagctcggtgtggatgccaccgtgtgggcgcggaccgtcacgggtggggagcggcagttgctgttgcgggctggtgatgtgccgttggatctgatcgaggggtggggcggtctgtagtcgagatggtcggtgagaagcgttcgacgtggcggtgctggaacctgatggccgaagtcgcctgccagactgtggggtggcgtttcgccaccgttgaggaccgcgaagtcatcaccgcgatggttgccgacgcagcggaacaggcgtccttacgcctgaccccacccgagctagcgaccagcccggcgaagttccgccgcccggacggcactagcgtatttcgtccgaagcactccacggtgttctcctccgacagcctcctggccgcagaggaccacctcctgcaacgggcccgcaccgcgaccggtccgactatcgacctgaccaccgtggggaccatcacgagcaaggcggacagcgagggtcgggtgctcggtcccgatcaggccgcagctttggcgtcggtcgcggtcccgggccgggtggtggatgtgttggtggggccggcgggggctgggaagacggcagcgatgaacgcaccgcgccgggcgtgggagacggagcatggtgccgggtcggtggtggggttggctccgtcggcggtggcggcccaggtgctggccgatgatctgaggattgccacggagaacacggcgaagtggtggaccacccaccaacacaccggcgtcactttcaaggctggtcagctggtcatcatcgacgaagcttccctcgctgagaccctctctttgaatcggatcacgctggctgctgaggaggcggggacgaaggtgctgctggttggcgactatgcccagctcccgtccgtcgatgccggtggtgcgttcagcctgttgatccacgaccgccacgatgcccccgagctggtcgatgtccaccgcttcacccacgcctgggagaagaccgcatccctggagctgcggcacggccgcaccccggtcatcgacacctacctggcacaggatcgcatccacgacggagacgccgaggccgtgaccgctgccgcttacaccgcctggcgccacgaccggcagcaggggttggcgtcagtactgatcgccgaaacccgcgagaacgtcaccgccctcaacatccacacccgcgctgacctcatcctggacagcacgttgaagcctggccccgaaatcaccctgtccgacgggtccatggcaggcgtgggtgacacgatcatcacccgccgtaacgaccggcggctgcggaaccggcacggctgggtccacaacggccaaacctggaccatcactgccgtgcgtgacgatgggtcggtcacgatccgcccacccagtgcccggttcggcaacagcatcgtcctacccgccgactacgtggctgagcacgtcgacctcggctacgccgtcaccgctcaccgcgcccaaagcatcacaccgacaccgcccacgtcctcgtcgaacccacggcgacgcgggaaacctgtatgtggctatgacgcgcgggcgcgaatcgaaccgggcctacgtcatcctcgaccgtgccgacgaccacgccgccggcgccgtgtgccgtgtgaactcggtcgacagccccggacgctgggtcgcgcggtccgtgatgagttcgtcgacgtcggcagcggaggtgaccaggcgtgcgtggccggtacggagcagctcgtgcgcaccacggctggtgacaggccccggcaccgcaccgacctggcgtccgagctggtgggcctcggacgctacccgaagcgcccccgatcgcgcgccggcctcaacgaccaccgttgctgctgacattgcctccaagcagtcgggagcgggctaggagccgatgccgcgtcgacacggatccgggaggaagctcgctggccagcgcactcacatcacccacccggtccagcaagtcacggtggccgctcgggtcggggcggttcacgccaccgccaacaccgcacggtgcacagcagcctcgacaccattaagcgtcaccagccaccagtacacgctcacggttcgcgaggtcgccagccagctcggcggcgacatgctccccatacgcggaagccgcccgagaacccgtgaccgtcaccagatcgttccacggtcgcgccaagaacgacgccgcgccccgcacgaacagaataaacggagcgcggtcgcccagatcatccagcgcctgtggccagtgcgcgtcacccggaatcagagtggcgatcccgctctcctcgaccatgcgcagccgctgggcgagcccatccagcctgcccggtgaggtgaggtggtcacgccacacctgaccatcaactcgactcagaccaggcacggtggtcgtgtcggtgtcaagcagcccgagcgtctcaacggcacccaggcggcgcatcagcccgcccgtgacgggatcatcaggctccgccaacagcgccagcaccacccgggcacgacgttcatcaacaccaagcccagcaacaccagacatgacggctcctcctcgaacagacttcgccgaacaggtgcgccaacgcagcccgcaggtgtcgcgacgtcctcagcccgtggaggctggcgaacgcggtaacattcgacagtcgcacggttcggcagctcgacacagcagcgtgctggtgttgctttggaggagtccacgggcctcgccccccacaacggtgacttcaatcgacattgtcgttgttggtgatcgaagtgtcaccgcagctgcgaacgatagtcttgatctggacaacgatttcgatgcggaggaaagcacatgaggctcacacgcttcaaggtcgagaaccataggcggttggccgacctcgacattgaggtgcgcgaccaccttgtgctggttggagccaacgacgttgggaagtcctcgctgctccggtgcctcgatttgctgctcggggcgagtacggcgcagctctactcccgtatttcggccgacgatttccgagcccccgaccaaccgttcgtgattgaagggactctcgcggacttcaccgatgtcgacaaggctctgtttcccgatgagatccacgtcgacccgaacacgaatccttcgcgtctggtgattaggctcacggcgactgtggatgagaacgagacggtggtgatcagtcgttcggcccccgagggcggaacaggacgccagctctcacgggatcaggtgcttggcctgggatggaagttcctcagcgcaaccgcccagacccgcgaccttcgggaagaccgaaagtcggcactcgacgacatccttcaagctgtcgacttgggtgaagagaaggccgcgttcgaagccatcgcaaagagcctgacgaccaccttgggtagctctaaggtgcttgaaggcctccgaggttcacttgctgaccagctgtcgaaggctctgccggacaaggtggcacaggatgacttggcgttcgtgcctggagctgctgccgacaatgacgtcctcagcgacgtgcggctgcaagtcagcaagcaaggcgtggcacacgatctttccgaacagtcagacggcacgcgagcgctctacgcgatcgccctctacgatctgatgagcgtcggcgctaacatggtggggattgacgagcccgagatccatctacacccgagcagtcagcgaagcctcgcgcgcctcctgcggtcgaacgccaaccagaaggtcatcgctacgcattctgccgacatcgtaggagccttcgatccagattctattgtcgttgtgcggggcggaggcgaagccgttcaacccaaggctggattcctgtcggacgatgagcgaatggcagtacgcctgtgggtgagggatcggctcgaaccactcactgcacgtcgtgtcgttgtcgtggaaggcatctcagatcggatcatcctggagcacctggccgacctcaccgaccgaaatctcgaccggctcggcgtgtccttgattgaggctggcgggtgtggcgacatggggccgctcgacaagctctttggtgccaatggcttccgtgtatccatgtcgcaactcatcgatgcagatgcagaagaggcattggcaaagaaactgggagtcgaagttgctgaccttgcaggccgatccgtctgggtctcgcgaagcgacctcgaagacgagtacgttcgtgcgctcggctcggacgccgtgtggacagcactccagtcaaatggccacttctcgaagaatgaacttggcaactgcgcagcaagtgggccggctggcacgcgtaccgagatagatgttgctgccttctgtcgacgaaaggcgtacaaagtaaatgccgcgctatcagtcctgccgctcttcacggcggcgaatgccacgcaggtgtcgtctatcgagagtctactcgaagagatcgtggcgtagatggtcagcccgactcagaagcagattgacattagggacacgcgggttctcgatcttcttgtcgttgctcctgcgggatgcggcaagacggaagcgcttgcattacgaatccaaggacttcttcaccgcggcgatgtgactgccccaaagaagatcttggtgacaacattctcgaaccgagcccgcgacaacatcagagaacgattggggtcctacctgacgccttcggtaatgcgcgaccgcgttactgttgtgaactttcatggactggcagcccggttgatcagagcgcacggaaatgttatcggcctaagtgaggaactacgccttccggagaacgactgggttggcgagcaactccgccaacgcaacaccccctggaatgaccgaggagcgatccagaatgcgcttcgtgagacaaagcaacaacctttcagcgacgcagcggtcgaagctgaacttgaacgactcggaaatgtcactgcacttgaactggaacggctcagaaaggaagaaggacgcctcacctatgatgatctgccaagacttgccgagctgattctcggttacgagagcgtcgcggacctctacgcgacacacttcggcgctgtcgtggttgacgaattccaagatctgactccccagcaactccgaatcgtaaacagaatcggttacaagcgcacaacctatggcggtgaccttgtgcaggggatctatggttttgcaggagcgcagccactggcaattgatcgggacatacgtgccgagtgcacctgcgtgatcgagttctctgagtcgcatcgatcctcaccggcagttctcaggacggtcaacgcccttatcccgatcacgtcgggacaggtactcaccgcagccaaccccgactcctggccttcgggcgggctcaccgggacgatcgtgcaccaatcggcggaatcggaagctaagtgtatcgtgaaaattgcgcgagccatcctcggcagggctcccgggcatcggattggagtgttatcccgaacagcgccgcgtcgccgattcgttgacgcagccttcgccgcggcaacagatatacctcactacaggtgggatgacggcgtgttggacacagatactgccaaactcgtaaaggcaatgctcgcgaggtttgatgtcgccgcctacactgccgcgcccgacaaagtaactttccttcggatggcggttgactttgactcgatcactgatgtcgacacgcgcaagagcatggcggatgctctcggttgggtacaagatctgctgtctaaagcggtgaagccagagagcatccgtggacgcatcaaggttggcgattcagcgaccctcatgactagccctggagtccatctactgagcggacacgtcggcaaagggcaacagttcgactgggtgattgtcgtaggccttgaaaagggctccattccgttcactatggctgacacatcagacgacgagatcgctgaggaagcacgagtgctttccgtgatgatctcacgcgctcggcacggcgtcattcttagccgagccaactcggttcggacgaacggggggcaccccatgagtcgaactccatcccagttcctcgagtggattgccactgccaatccactcgatgcgactgggatcatcgagtggttcaaagctgcggactggcgtgtaatcagtgagagatgaccaacgttctttggagagaagtgcgctgtccttgatgatgatccacctccgacccgcgcaaccttgggcgccggactcaccaggttgcagatcggatcagactggtaagcaagcgcccgtaaacctcgacttccctgaacacgggcccaggtcctattgaccccgttcagagagcacgagttcgtccagtcgcgctgcgcacccgatcccacgtcgtcagaaggtgagcggtagccagccagggtcatttacaaagcgctcagcgcgatctacagtagatagtaaggcaggttctcgtctcttgcgggtccatcgggacggcctacgggcgctcttccacgtactgtttcctcgacggagtagcacgtgtgacgagagagcccgatcatgttccgaaccatctggacgctcagcattcatgtcgatgactgtcttccagcactacatgccgagcaaccggctgctggcagctacgcgaactcggcgaggtgtgaagtggggtgtctcggcaatgctcatcggcgtcccgtatctcgccatcgccaacgtgttcaactaccctgactgaccgttctgtggtgacgtgcaacggggtatcgatgttggtgtgcgcgaggacgttggttgtgggctcgttgtcgggtgcgtaggcggcgttctcgtcgttgtcaatagtgatgcgggtggatagggcacggttgaggattcgccgctcggctggcacgtacgttctcgactgtggccacggttagagcgaggtgtgctccaacggtgtcaacccctgggccaatgtgttgatgaggtcacggtgacgagtatgtggtcatggccgcacactccagattgatccggcaggcttccagggtggtgaacctcgttgaggggtccagctaagtacctaaggtcatggccaagcacgatcgcattcgctttgccgtgtgctctctttcggatcatcccggggagcacacaagatcgcccgaacaatggcgatcttgtgtacagtgactttgctagagatgttttcccaggaccgacagtgactgccagtgcgatgttcgaggtagtggtgaaactacgggtgtacaagatctgggtggccgtaaacgaggttgcctcttgggctcaggtcctgcctgacggaacccccctatctgagccctggccatgacgggtatgccttagtcaacgtggctgaagtgtcctgatatcgcagcatcagtgactagtttggtaactgtaatgccgccgcacccgttttacttactttcgatagaaagcgggtactctgtgcactttgcagggtttttgccttcgttgcttcccgtgcgacttactgtgtcttcttccttggggaggtgtaggggagggtagaatgttcgtggactagatcaacttaaccaacttacgggttgtaggttaacacctatctgtcaaccttgacactgtaatcccattgttcagcaggcacactgtcatacatctcactatctgtaaatgcagagcctgtggtttcaccaccaaagcctaactgccttaaatgtgcaatcccgttctgtgctccctccaaatcgatccgctccagtgtttcatcagcttcagaagcatagaggaacgtcacgctaacctacgatttggttctgggttgaatttttaggcgatctgatctgaagtttcgcgcgcctgcatagcccgatccgcaatctcgtccagcccgctgattatgtgatgcagctcacaagtagttagtaacaggacctgctccgcggcctggcctctatcggtgatcagcatgtgtccacggcatcttatctaccacgatgtcgcaatagttgcactgattctgacggcaccgccaacattcggtaagtgtaggataggacaagccttgagagtgtggatggaatgtgccaactctctcagtcctcaaagcatcagtggctagatcaacaaacatcgtaaacaggttgttctctcttatagcgatgtgtctatcgaagcagatgaacgagtcatctgccaggtatgaatgattgccatcactagtaacctctgcgtacggcagcaagacgttactgatgtttgagattaggagatccccaaaaatagatactcggagcgaaatagtatctatacctacgatgatgccgtgaacactactggtttctcaagcaaccagatccgcacatttaaaccatgtgaaacgtccggtaaacattctgctgtaagtcacccaggtgaccccttggagaaagttatttcagggctatggggctcgggggtgcgagaggattgttcgttgctcatttcggattatctttcagagatgagcaaccgcaatcggcattgaccagaagcgggtaaccggttgaccctagacagacttatgtttggtattcgtcaagcccccatcgggcgactggaacctgatcaattagatgatttgattgctattcttagaagaatagtttcctagattttatagcacttcccctaaacgtctaagtatgccctaaatcgtagctctaatgcagatgggcgggcgaggacgttccgggaagcatcgtcaagagtgtcgatgtcgcctgctctagctaagactcgctgcctaggaaaatcctgaacccaagtggctcggtatttgggggtgtagttcctggcgctatcggtgatgtccatagcagtcttggcggcggacgtgttcgttaagtcaataggactccagctggttttgtactcgtaatcttcaagatcaacatcgattcttagctcagtattgaggatctcgatcatgaaactcgaatcagagggaaaacttaactatcatatgcaatatcttcttaagaagagcgcttgccgactacgttatcaagcgatcccacgagcaccaatctggtatcggtaaaagtgttcgcttttctcggcggaaaatccccaaaatgcttggatatttttcttgacggatgaacttggagaagcgctgttctaatgcggcgtcacgccagacagtgtgcgcccggcatcgcccaagcctgagtgtccgaaacatgcttgatgcgtgtgaagcgttcctgcgaccaaggctcagcttgctggggatgctctaattacttctgctgctcgatagtatgcgtcctaggatagacgttgacttgagttga

SEQ ID NO: 64 - DNA, 2854 bp, Propionibacterium acnes
  source 1..2854: mol_type = genomic DNA
tcttgttgagcttcaaagccatgaaatcttcggtctgcttcttaatgccagtctctgccgggaatcgctcgatggaagatgcgccgtagaagcctacgatgccatcggtgtgatcgagaatgtattgcgcatcctcgggattggcgatggggccgccatggcataggcataggatgtcgggattgacggatttggcggcgtcggcgagttcctgaaccttgacagcagcatcctcgatagtgagtgctgtttttgcaccaatggttccggaggttgtcagacccatgtgggggacgaggatgtcagagcccgcccgggccatatccttggcctggtcaacgtcgaaaacatagggtgaggtgaggagatcaagattgtgggcaattttgatcatgtcgatctccaaaccgtaccccatgccagtttcctcgaggtttgcgcggaatgtgccatcgatgagaccaacagtagggaaattctgcactccggcgaaccccgcggctttgatctgggttaggactggggcatcactctgaagggatcagtgccattaactccggcaagaactggggtgtgcttgacgacgggcagtacctcgcgcgccatgtccatggcgatctcattggcatcgccgtaagcgagaagccctgagagggagccgcgacctgccatccggaaacgtcctgagttatagatgacgagcagatcgataccgccggcttccgcggatttaaccgtaatcccggtgcctgcgccgccgcccaccaaggggattccgttggcgacttgtccgcggaactttttcaggatttcagtgcggggcatgatgctattcctttccgattagttatggatgatgagctcgtgaagagcccgcgccattgcttcgccaaaaccagaatcattgatattttgttttcgctcagtcacagtgatgtcggtatcctttattccctctcgaatggcgttgaacaaagcgtcatcggcttctggatcatagaaatcttcacctggggtatctattcctgcgacccccagagtaggaatgaaagcttgagccgggccgcgcgcagcggccgcctttatggcgattctgtgaccaagctcggccatttcggtgttgctcgtttgagcgtcaccgctggattgtggatatgcaacgtgcgagaggaatagcgctccggaatagtgtcgacagggccgaaattgaccatgtcaagcgcgccaagactgatgacttcgggtattccaaggtctgctgcggcttccatccggcggggtcctgccgagagaactcctccgcagaggtcgtcggcaagctcggtagtcgtcaggtcacatattcccgcgagtagcccagacgatgcgagcttttctatcgccttcccctcccggaatcagttgcgtggaagacgaggacctcgtacccaaggtctgtcaaggtcttgcgagcttcgtcagcagccggcgttgtcaatccgaacatcgtcaggccgacgaccggtttgttgtgagcggggttgctgacggttctaacgtcttcatactccttggccatggctgtgatagcggcggctgcattggcgaagaccatgagcgacacggaattgatgccggccacgtcaacgacggagtacataagtgtgacgtcggtttgtcccacgtaggggctgacatctccggaagccatcgtggaaaccaggagcttggggaatccaatcggcaatgtctgcatgaccgaagccgctacggatgatccacctgatccgccgagggacaggagaccgtggattttcccctcttcggcaagcttggatgcaataatcgaagcgccacggcccatgacatccatcatttcgccacggttatgacgtgttcggatgtcacttggcgactcgcctgcggcacgaatgacctcatcggacgtgtagtcggctatacggctgttggagaatgagccaacatcgatgatgactacctggctgccgttggtaagaatgcggtgacgaagccagtcgaactcgtctcccttggtatccaaagttccgagcaaagctattgcggccatgaacactccttcgtgatcgtgtcatcatgaccgtagttcggtgattctgcctacaccatgccgtttgagacgaattggcctgtacgttgtatcgctggttgtgaagaagggcaatacttcaggtgtggttgtcaaggttgatcctgcaagtctgagccggatgctgggggagtggagccagcccggagaagcgcttccggaagcgttggcggacgcattgctggatctcattgacgctggttttctgcccgctggtgcggttcttccaccccaacgagcatgcgccgcgacactgcaagtatctcggcaaaccgtggcggaggcatttgggattcttgaagccgcaggccacattgcggcgttggttgggtcagggacgcgggttagatcaggccgcgctgcagtgagtactgatggcaggttgttctcgttcagcgaggctgcacctggcctgatcgacctgtcaacgggggcgctacctgcgtcagaggtggtgcgaagagtgcggctagaagaccacgtcgacttggatgagtatttcgataccgacggatatttcccggctggactacctatattgcgtgcagccatcgcggaacggctcactcgagatggagttcccacagtcccgcagcagatcgttgttaccaacggcgctcagcatgcgagttatcttgcctctcagctcctggtctcggctggtgacaccgtgttggtggaggagccgacatatcggggtgagctcgcagagctgcgactgatgggcgcccgtgtgaagagtgtccc

SEQ ID NO: 65 - DNA, 728 bp, Propionibacterium acnes
  source 1..728: mol_type = genomic DNA
ggttgtctggctcttcgggcctgaggtggggcagctagtcggggcccggtgcggtgaggggtcggggttattcggcaggatcagcagcgcccaaactcgctgctccaagaagaccccgactgtgtgtgagcctaccaactactgccctcgttgtgatgccctaacctgcccggtctgtacgtgaccgacgtcgagcgcggacccgatacgattatggtgggggtaaagttagctccgggcgaggggttctgccccgactgcggtgtgctcgcgtctccccatggccgccgccgggtcctgcacgatgtttcttcggcagtatggcggtcgtgatcgggtggtgtacacgcacgtggcgctgcctcgaagccttgtgtagcaagggctctttcacggaacaagatcctggaatcgccgtactgtgggcggtgttgacccgccgtgccactcgatgggccgtggggcagctgcgccgagaacgcgtctcagtgctgggactcgcacgccaagctcagggcgactggaagactgtctggcgggcggtcaacccggtcttagaggaggcggacgctgacccagtccgctttgcggggatgcggcacctgggggggtgagcacgtctggcacgacaagaacccacgaacccggggaccgaagatgctcaccggcatagctgtcttcacgcacaccgacgacgtcccacgggcccggctgttagacctgaccct

SEQ ID NO: 66 - DNA, 727 bp, Propionibacterium acnes
  source 1..727: mol_type = genomic DNA
agggtcaggtctaacagccgggcccgtgggacgtcgtcggtgtgcgtgaagacagctatgccggtgagcatcttcggtccccgggttcgtgggttcttgtcgtgccagacgtgctcacccccccaggtgccgcatccccgcaaagcggactgggtcagcgtccgcctcctctaagaccgggttgaccgcccgccagacagtcttccagtcgccctgagcttggcgtgcgagtcccagcactgagacgcgttctcggcgcagctgccccacggcccatcgagtggcacggcgggtcaacaccgcccacagtacggcgattccaggatcttgttccgtgaaagagcccttgctacacaaggcttcgaggcagcgccacgtgcgtgtacaccacccgatcacgaccgccatactgccgaagaaacatcgtgcaggacccggcggcggccatggggagacgcgagcacaccgcagtcggggcagaacccctcgcccggagctaactttacccccaccataatcgtatcgggtccgcgctcgacgtcggtcacgtacagaccgggcaggttagggcatcacaacgagggcagtagttggtaggctcacacacagtcggggtcttcttggagcagcgagtttgggcgctgctgatcctgccgaataaccccgacccctcaccgcaccgggccccgactagctgccccacctcaggcccgaagagccagacaac

SEQ ID NO: 67 - DNA, 32951 bp, Propionibacterium acnes
  source 1..32951: mol_type = genomic DNA
ggtggtgccgaagaagaaggaatggccccaccaatctgctggtcggtagaagtacggggtttgagccagtcgagtagtttcataatctgctccttgcaaggtattgtgaaggatatgaaatctcttacccctcatttgcttctctgctcttttttcacaagcattgctcctgccttaggagaaggatttcgcaacaaacgtgtggctttcattccgacagcagcagcccacgaggagtacacagcctacgtggattcagcacgctcatcatggaaagaacttggcagcaatatcaccgatgtggatattgccagaatgcctctaagaacagcgaccgaggcgcttgagcaagccgagataatctatctttcaggagggaactccttctacctcctcgattgcctacgctcaacagaaatcgaccagattattcgagggcgtctggccgaaggggcgattctagttggtgaatcagctggagctatagtttgtagcccaaatatcgcctacattcagccaatggatcgtgtccctgacaactacagccaggctgactacaccggactgaacttagtggacttcttcccggtacctcactacctcgcccctccatttgtgaagagttccaaggaagtagtcgcccagcacgctagcctcccactcgagctcatgaacaacgcagaagcggtaatagtagagggtccccaaaggacaaagatctcatcagagcaccagtagtcctcgtgagtcgtacaccgacgtgcccgtgtggctgccaccgcctcggatagcgcggtcgagggccatgatggtggcgaccacctcgtcgatcttctcggtggacttttgcttgtcgggtttgatgtttcctgccgggtcggtgcggacgtgaatgttgtcgaccatccaggacagcactgggtgcctgccgtgagcgagcctaccttctagtgcgagtctcatgagctccttggacggtgggctcatgtctttgaagccttgcccgaagggcacgacggtgaacccggcatcgtcaaggttttggctcatctggactgcgccccacctgtcgaaggcgatctcgcggatatcgaagcgtgtcccgagttgctcgatgtggcgttcgacgtgggcgtattggacgacgttgccctccgtggtctctaataagccctgttggtgccacaggtcgtagggcacatgataacgcgccacccgcaacgccaggttgtcctccggtatccagaaccacggggcgatccggtacttcttcgtccccgtagggtgggaagatgaggacgaaggcggtaatatccgtcgtagaggcaagatccagcccgccgtagcagcgtcttccttccagctcgtccaggtttaccgggtcggctcccgcgtcccagatgtgcatgggcatccaccgcaccgactgcttgacccactggttcaacctgagctgccggaacgtgttctcctcggcagggttctgccgggccgagttgcacgccgcgcgcaccttgtcgatcggcaccgtcacgcccagtgaggggttggctttgcgccacacggcctcatcggtccaatcatcatccgcgtcggccccgtagatcaccgcatagaacgtcggatcatacttcttgcccgcgaggatgtcctggactttctggtgctgctcatagcaaatcgaatgcgtatcagttccggcggtggtgatcaggaaatacagcggctaggtgcgtgcgtcgcccgaacccttggtcatgacgtcgaacagggctcggttgggttgggtgtgaagctcgtcgaagaccacgccggagatgtcgaacccgtgcttgaagtaggcctctgcggagaggacttggtagaaggagttggtgggcttgtagatgattcgcttctgcgaagagaggatcttcacccgcttcgacagggctggtgattggcgcaccatatcggcggcgacttcgaacacgatcgaggcctgccgccggtcggccgcacacccgtagacttcggcacgctcctcaccatccccacacgtcagcagcagggcgacggcggcggcaagctctgatttgccctgcttcttggggatctcgacataggcggtagtgaactggcggtagccgtcggctttgacggtgccgaacaggtcacggatgatttgttcctgccagtcgatgagctggaagggctgtcctgaccagcggcccttggtgtgtttcaaggcttggatgaacgcgaccgcgaagtcggctttccgcttgtcataggtggagcctgcggccatgaaccgggtcggcgtgtaggtgtcgagagtgcgcatcacgcccgtcaggctccttcctgtgctggttagttggtgtgggcgaaggcccaggcgatggcgtggccggcgtcagcgaacagttcgtcagcctcggcgaccaggtcgagttcgcattcactgaagcctcgggcgtcctgtccccagccggagatcggctgctcggcgagcttgtagacgcgggcgtcgtttccgatccggcctttgcccaagtgccggtaggccgaggcgaggacgaagtccccgtaggcgatcaccgtgccgtagctgtcggtcgccatctgcagctgctccatcgtggtcttttcgttgttcatgaccttctccttcttgccttgttcggtcatgtacatacagccataggtgcgcgctcttatccagtcgtaaaagccctagtcagcccactatttttgaggaatctttgaggggcgacgggcacggaaacggcccctgattgggtgggtacccacggtggcttggggtcagtcgatggccaggtgccaggcggggatcatgcggcgttccccggtgatcgggtctgggtagcggtcgttgacttgggtcatgcctcgcagggttgcccctgcctgggtgaggttccagatgatcgtggtcaggccggtctggttcgcgctgatcgtgaactcgccgatgctgtgctccttgagttcgtcgaggatgctgggcacgtctgagtcgtagagaccttcggcgaagtcgagcagctcgttgcccgcccgctggctgttcatgtagacggtgagcaggctcgtggacgaggtttgggtgcgggtcgcgatcttgctggtcgaggtcgtcaattgtgttcatcgcgggtgtccttgtgggtgggtggggtgcgccaggcggcgttgccgtccaagtgtttgagcaaggtgcggcggacgggtttggtgtcgtcgccgatcagaccgaggcgcagcagccagcagcgcatcgcatatttgtcgttcccgcccgtttcggcaggtttggctgaggctcttgtggcggttttggcgtggtcgatgatccgggcgatcagcaccgtggtggcctccactacctgcgggtcgggcgctacgtcgaaccaggggaactcgaccgtcccggcctcggcgtcgatgctcatcggggttgcggggatctggagtgctttggcgatgagctctcctttcgctgctagcgtcgcctccaccttccctttcgtggtgtcctcccaaccggtggtggggaacgccaacgtcaaccccaactcgcctggctcgtcggtggtgtccgtcgggaatccggcctgcgcggccgcctcgaccagcccggccacgtcggtgtcctcgggcagatgcagcagccagtcacgatccaacatggcctcgccaatctggtaggcaaacgttggggttcccagatactcgacggtcgctcgcagctgggtggcgagaaaagcggcgagttgcttgcggcctttgcgctgcttggtgaacttgagtgtcgtcatgaccggcctcctttgcgtgttcccctggtcggagtggttttcggtcatgtacatacacgctctatcccgaccagatagcaagtccggacggccacctatttcttgcctcgatccacggccttcaccacatccaggtaggccaactgttggccgtcgcgcaggcaggtgatacctgcggcgtccccggtggcgtcggcgtagcggcgcagaatgactgaggcgtatttctcgtcgagctccatgcagtaagcgatccggttggtggcctcacacgccatgagcgtggagccagagccggcgaacgtgtcgagcacgatcgcattcgcctgggtggagtttccaatcggatacgccaacagatccagcggcttcgaggtcggatgatcagcattcctgcgaggcttatcaaaccgccagacggtggtttgtttccgatccgcgtaccacgtgtgcttgcccgtcttcacccagccgtagagaacgggctcgtgttgccactgatacggggaacgacccagcaccagggagtccttgacccagatgcaacaccccgacagcttgaagcccgcgtcttgaaaggcgcgccggaagttcagaccttcggtatcggcgtggaacacgtacgcggacgcgcccttctcacacacgcccgccatctgagtgaacgctgcgagcaggaactcgtagaacccgtccgcgctcatcttgtcgttcttgatcgacaagccgtcagacgattcgaaggcgacgttgtatggcgggtccgtgagcaccaagttggccttcttgccatccatcaacagctcgatgtcgcccgcgttggtggcgtcgccgcacaccagccgatgcctacccaccgtccagatatcaccccgctcgacgaacgcggcagcctccagggcggcggtcagatcgaagtcgtcatcctccacctcgtcctcatccaaggagccgatgagctgggcaatctcatcgtcgtcgaacccagtcagctcagcgtcgaaatcactcgcgtccaggtcggcgatgagcagggcgagcttgtcctggtcccagtcgccactgatcttgttgagcgcgacgttcaaggctttttcgcgggtctcgtccaactcgacgaccacgcagtcgacagtggtttcaccgaggtcttcgaggactttgaggcgctggtggccgccgacgacatggccggtggtcttgttccagatgacaggttcgacgtatccgaactccgtcagcgaccgcttgagcttttcgtagtcggggtcgccgggccggaggtctttgcgcgggttgtagtcggctggcgtgaggtcagcgatgggtagctgctcgatgcgcacggggctccaccgccttccgcaggtcgcgctcaaaacgccaggtttgttcccagcgcggccaatcccggcccatgtgcccgtagaccgcgagatcccggtaacggggtgtgcgcaggttgaggacgtcgatgatccccgccggccgcagcacgaacacgtcacgtgcggcggcggtcaagatgtggtcggcgtactcgccggtgccgagcgtgtccacctcgaacgcgaccggatcagccttcccaatcgcatacgagatgcccacctcgcactcagcggccagcccggcgtcaacgatcgtacgagcgatcaggcgagccatgtaggccgctgaccggtcgaccttggatgggtccttgccggagaacgcgcccccaccatgagacccgagcccgccgtaggtgccgaccatgagcttccggcccgtcagcccggtatcggctcgcggcccgccctcaacgaaccgacccgacggattcacaagaatttcggtgtgctcgtctatgggtaggtaggtctggcaggccggggccacaatcagcgagcgcacctcacgctccaacacggccagatccttgcccgcctcatgctgcaccgagaccacgacggtctcgacggcggcgggggcaccggtgtcgtcataacgcacactcacctgggccttgccgtccgacttgatcccgcagatcgtcccctcgacctgggcagtatcgagacgctcgcagatgcgatgtgccaggacgagcgggagcgggaggcgttcaggggtctcggcggtggcgtaaccgtagaccgtgccctgatcgccagccccctgcaacgcgaacgccgaactatcaccaccgcgtgcctccagcgaggtggtgaccccggcgttgatgtcgctcgattggcggcgcgtccacacgtagatcaggatcccgagcggactgtatccggcacgcgcgagggcggtgcgcacagactcccggatacgcgggcggtggttggtggtgatttcgccggtgacgatgatccgccgaccggctgccatcacctccaccgccacccgtgcggccttgtcgtcgtagaggatgtcgtcgaggatctggtcggcgatctgatcggccaacttgtccggatgaccagcacacacagactcggcagtacgaatcgaacacataagcacactcgcttccacgaatcggaggggaacaagaaagcgtccaccccactagagggtggacgcgaagatcatgaggggcggttaggagcgggcgttgagcagctgctccatcacctcgtcgccgggcgtggtgcccgcgtagtcggtggtgcaggtggcgcgcacgatctcgtaaatctcgtaccaatacacattcgcctgcttcccgaaactctgggacatggcgacaaacgggctggcgatggcggcaccggtggtggggtgcttgccgagcaggccgaacttggagatcgcctgctcgcactgcacataccgggcaaacgcctgcgcatacgcctcaatcaggcgaggcgccacgaattgggaaccgccacgttgatcgagccactgccacgtctcccgatagacgaggtcagcgccaagcggtttgccgtcacgctgaatctccgacagatagtccgatggttcgggcatcgtctccccggcaagcaccgcaccgtcgccaatgtcattacctgcgaagtcgaagggttcgttgagcgggtcttccaggcgggtggcggggcgtccggcggcgagtttctcgcccagcgggccgggcttcgcgcctgcacgcacgcggcgtccgcccctgttggtgccgtctttggccatgggtcgcctccccgccgtagaatcgtcatggtttcggtgctgaagtccacgggaggtgtgagtggttgagtctttaaaactattcgttcggacctacgtgtattgggtagggctcatccttggcttcgcgatagtgcccggttctctgctcttcactgctgaagtcgccccggtgaacactccattgtggcttgcacctttcgccgggctgctgctttttgtcattgatcggccatcaacatgggagccgccgctctggcgagcattactgatccgagtattgggtgcaggatttgcagccaccatgctcatcgcgtttgatgcagttgcttccacccactatggatctcaacactggagtgagacgctcctatctttcggtctcggttggattgtcttcacggtagtggcaggacacatgctcatgagcagctccgcccgatttggcacacctgctcacacgatcagggacgcgatccgtacctacacgacatggataggaatctgcttcgggattttctatatccccgccgcgggactctccgcagctggcactcttttgatggttcttccgctttatggaacgttcctcgccggcctggttcttttgatagttgacccgccacgacgatggccgcaaccgcgagtgaaggcactgtggatacgactcttgtcaagcgtggcagcagcattactacttgttgtcacgaactcgttctatcgcagtactcgcacacacgagattttcgtcggggactggcaggaaaacctggtcttcttcgtgggtgcttgggcactttatgccgcagtggctggggccaggtatcttacgcctggccccagccacgaagcagatgacaaactcagtagatgaattcagctagagcttgacatgctgccctcttggtttcttcgctaggctcaacgcccgagtagccgtatgccccattggaaccgtctgtgagaaggccaacgtatctgtcatccaatgggccatcaatttctgcaaagaacttgtcctttgcggttcctccgtcgcttgcaccaacactctcagagatcgccttgaatcgctgcaatagcgaaactggattgttgtagtagctcctcagcgttcgggacagaaggttggggtcgtcggctcccgagcctttcagcatcgcagccagtttgatcgcatccccgtcgctacacaggtcggagtagttgcagttgttcggcagatcattggggatggtcaaaccttgaagtccgctgtgattcttatagttatccccttggccaacaagagcccttgctattgcaataatgtttgagccgggattcaggtcaacaaccttttgaatcggaccgagcgctgaagctaagtcacccgcccatcccgtccacttatcaggaacgagcgggttcaggttgatgtagcccagggtggtcacgctcatatgcgggatatctactgcaccacctgcggggtccgtccattcttgtcgatcgcagcgaatccacttattcaaggcagagattatctgagacgcttgagtgtcatcttccagccttttcgcgtccgcctcccgatatgcttcagctgccgcggaccactttgcacttcccttgaggtagaccgttgataggtagttgaggacacatcgccaagtcggaactttgacccaagtaacgtagctgccggatgtgatcggatcctctccgaaagcgtagtccttatagaccacgcgcaattcctcgaaccggctctcaagcgcttcgatcagatcgagaaaatctagagcgtcgtaattcactggctgcgcgtggcgcaccgacgaatcggctgacatgcgacccgaatatgccacgcggtcaagatcccatttcccccgatatccactgatttcgtggaactgatcaaatacccagttgtcggggatggggaaaccgagattacctgagaatccggtagacatgtcagaaacgaatgatgctaccgcgtatccagcctgagctatccgggtgcagatgtttcgcgaggcgtagatacccactcggtagccgccgccgaggctttgcgttactgccttgaagtagggcaggatgtggctggtcacctgaggatccgtggcatcgtagtcaacggcgaagtagatcactgtaggtggaacaccaagtcgttgggcagcggtttgggcctctttcgcatgacggtgcccattttcgacactaaagtacttaagttcagttgagtactcttgaaaaattgggaaatacttcagcccatgaccaacgattcgctctagctcgcctgtgcggagcgccttgaaatagtctgcctcagacttactgctttggttgggttcactgagatagcggcctacgatctgataaccatcagccttaagatgtccagcaagctcgtcagtgatctcaaagcgcgtatcgcaagccacacatggccgattggggtcgcctttagaagtgagcaggctcatccatgtggttgggtcgaccaccccggtcactggcaaggcgtgtgcttgctggaactgccacagcgtgttgctgatttcgctgttccacgtgctggtcggcaaaatggagtagccgttgcagaccagactcacagtggctagccatacccactggttagtgccgctactaattgtccgtagtttggagcgagtgcctgcaccaaaattcccggtggcttcggcaggtgtgtatccttcgattgcttggaggacctggattaaagccgtgttcatttcacgcccgtacaagccatcagtgggaatgatccctgtgtagttcttgtacccacggttaatcgcttgctgtgcctgacgaatagctgtcttgccgccgtaggcagagagtaaccggaactgtttcattgacagaagcgccatcattagttcaacatcgaccgttgcgctcgtatcgccaaggccaatatcgactttcatctggcgaatagagtcggccaagtggtcggtaaactcaagagtgatgccaccgtattcggctcgatatcccttgcaccacaaggctccttgaataatcccatgaacattgtcgtagccagaagtttgagtaatgccgtttggccaacgagacttgaatcgagactgtgttccagaaccgaaattgtttgccgtcgctgtaatacccagttcgatttgcagagcgcggatgagtgcgttgattgtatcccagccagtgttaccggtttcttggactgagccgaacccagttttattgccgtaagtcgaattcagccactgctgagttttcagcaccatttgatctgccatgattcctccttcagaaatcagttgttaactcgaggcaggcgaacacctgccacggaggggtccagaacaccggatgagaagctccgagttttttgccctcgcctgtacgtcaccgggaaacccgaatccggacggcaagagcgaaacttcgcgagtttcatccctcactggtactgccgacgaagcccgaagtgttaataccctgtttgattctgggactttgcgcgcagttggccccgcccgctgacctgtccgagcgtcgtagagatcgagaggccccaaccccctcgccagcgccgccaggttcccccgtgtctgccgatcagcaccgaggtgggcatctttgaggtttcgcaacctcggcgcgacgtggcgcgacgtggcgcagatttcagtaggtgtagatcctcggggtctgcctccaccggtcgccgtcgagcgccgactggcgggagtggcacggcttacacaaactgcggaggttggcctggtcatgggtgccgccgtgctccaacgggatgacgtggtggacttcctgcgccggggtgtaccggccagccgcgaggcagtcctcgcacaaggggtgggcggtgatgtaggcggtacgaatcttgcgccagcgggccccataacgtcggttgatcttcgggtcacgctgccacttgcggtagcgctcgtcctccgccttggcgtgggcttcgcagaagcgggcgtgggtgaggttcgggcagccgggctgggaacacggacgggcaggcttgaccggcatcacgcacccctttcccggacacggcaaagccccaaggcacccagccgatgaccgggcttgccctggggcttttcctacttttcaaccacctacatcattgcaggcccgaaaccctaaatgcatccgcagttcttgacaccttttggcggctaggttcacgcggcctgcccatacagcgccgacgccagccgggcgagcgcccgagacttcttctggtaggcgctggtgcgctccacgtagaagtggtcacacaccgtttgcaccgcctcatcctgggtaccgtcgccgaggaagaatgcttcgagcacgaacctgtcgtcgtcggtgagcagctgccaggcgggcaggaaccacgccatgtactcacgcgcctgggcgtaacgggcacggtagatgtcgatccgatccaacgtggccgccacccgcatctccccagcatgcagatccgtgtggcggggcatcccgtcgagtttcgatgaggctggggtggtgacgtcgtcgtaggcggtcttgatctgctcgtcggtggtgtcgatgatctgctccatcacggcgaagtcctgcaatgcgctgatggctgctttgcgggtgtcgaggtatttggtcatcacatgcatgacgactccttcctgcttatggttgtgagttcggtggcgaccgcgtcgatcaatgcggcctgggtcatgtccttcgcctccagcgccttgaggacggcttggtcgagggtgccggtggcggtgaggtgggtgatggtgacaggctcggcctgtccttgtcgatacagccgggcgttggtctgctgatacagctccaagctccaggtcagcgagaaccacacgagcaggtggccaccggactgcagattcaatccgtgcccagcggaagcggggtggatcaggccaagcgggatgtcgccccggttccacgcctcgatgtccgccgacgtcttcagttcgcgggcttgtgggaagcgacgctggatgcgttcgcggtcgtgtcggtaccagtaggcgacgaggacggtttggccgttggcggcctcgatgatgtcttcgagggcatcgagtttcgccccatgcacctcgaccgtatcgccgtgctcgtcgtagatcgcacccgaggcgagctgcagcagcttgcccgacagcgcggctgcgttcgccgcatccaccacctgcccatccagatcaaccaccaggtcggccttgagctgctcatacacagctcgttctccggctccgagcaccacgggcgtggtcgtcaccgtcagatcaggcagcgtgaggtggtcggtggtgcgcattgacaacgtcatgtcggcgatagcgtcgtagatttcctcctcagcgcctgccctcggcttgtacgtgaacacctgcatcccgttgcgcttatccggcaggaaccacttgtcgcggtagcgggtgatgaatctgccgaggcgttggccgccgtcgaggagccggaattgcgcccagatgtccatgagcccgttggaggcgggggtgccggtcaggccgacccagcgcttcacgtgtgggcgcattttcaccaacgccgtgaaccgcttcgcacggtggttcttgaagctggagagttcgtcgatgacgaccatgtcgaacggccagctatcgccgtactgtctgacgagccaggggatgttttcccggttgatgacggtcaccatcgccgacttggccagcgcgtcgagccggtcagctttggtgccgaccgcgaccgccaccgatagaccttggaggtggtcccacttggctacttctgctggccaggtgtcgcgggcgacccggagtggcgcgacgacgagcacccggctgacggtgaagtagtcgagcagcagctgccagattgccgtcagggtgatgacactcttgccgagtcccatgcccaggaggatcgccgcttcgtggtggtcgaggatgaaccgcgtggcggtctgctggtagttatgcggccggtagcgcatcaagcaccttcttgatgccgtccaccgagtcaacgaccagcgcggtgaagccgtgggcggccagttggctcatccggcggcgttggatcggccgaggcttcttgccgggggctttcacttcgacgaagacgacctggcctcccatcaggcatagccggtcaggtacgcccgtggttccagggcagacaagcttccagcacaagccgccggatgcctcaacggccttcttgagctgggcttcaatgtggtgttcgttcatggtcactccttgagtggtttcccacgggggtgacgactggtgacgggtggatctggacttttctaaaggagatatttttgtggccttagtaatagttcaatactgatcgtcaccggtcgtcaccctcatcgggtttagctgttgaattcgctggtcagagccagtccgtagacgtacatgccatgcttggacttgcgtcgttcaaacccggattgttcgagagtggcgttgaagtcggccatcggccgagcccacccgctggtggattgcgcccacgctcggtactcctggtacaggtcaccggcgcgttcggatagggacgggtccacctcgcagcgggcgtcgaggaattgggcgaaccagttgttctcttcccgatatgcgcttgaggcagcgaccacttgggcgggtggggtgagctggtagtcctcggcgtggatgagccgcgagccttccatgatccatgcaagtaccgctccgccggcggtctcgtagaggtggtcggcgtagttcttcacatcggagctactctcgatgaccgcgttgaacgggatcacgatgagcctgcgccagatgcccgcatccatcgcgcccaccctgggcaggtgattcgtgtagaggatgagcgtgtgggatggggtgaacgcgaacggtgccttgtatttcttctccgcgtagatctggtcggtggaggcgagttgcttgaccgtggaggtggataggcgcacgccttcctcggactctgcggcgatgatgagccgtttgcctttcgcttcggcaagctcaggtttgacgttccggttcccgccaatggtgagcacgtcggcggacatgttgcccgcatacgtgccaagcactctcgcgatagtgttccagaacgtggacttgccgttgcggccgtccccgtaggcgatcacgagggcttcgaccatgaccgtcccgatcgctgccagcccgacgatccgctgcacatacccgatcagctcccggtcggattggaagaacacgttgagcgcccggttccagatttctgcgcccgtgtcggtggggtcgagcgcggtttgtttcgtgatcagatccagcgggttatggtcacgtcgggtgccgtcacgcacatcccacgtgccgccaggcgtgttgaggagatacgggtcagcgtccagccgggctggggtggtcagcaacatcgggtgtgcttccctcaggcaggaggtgatcgcccgggactcgcggcgtttcaacacgaacgcctcgtatgccttcgcgtcctcaaatgcccggtaggcggcccgctgcggtgaggtgaaaccgccgagtgctttcgctttcgacgatgcggctgcgagcaccgcgttcgcgcccgtcaccatgagctcgtcgcgggctttctccagcagatgcccggcctcggctagttgccggtcggtcagttcctgggcgatgccttgcgcagcaggcgcagactcagaccacacaccgccttcgtagacgagccagtccgtggcctccgtaaacgccagacgcgacgagtattctgcggtgagcatggatgcctgcccgacatcggtgaagtcctccggccgcaggctcgtcagctccgcgtaggcttccggcgacagataacccggctgcgcctcgactttggcggcgaaccggcaggcgctttgccagatcgactccaactcgtgatccgacaggggcggttcacacagggacgctttccggtcgaacaggtcacgagcttgggcggtctgcccgtaacggatcaggacgcgtccggcgaagcgggagagggtggcgttgcgggagccttccccgatcacctgcgtggaagcgtcgaacgcggcgaacacgtcgatctcgtcggcctcatccagccaggcgtcgagcagctttgtgccgttgtggatggtggtttcggggttggtggtgccgtagatgaaccgtccggcatccaacgcctgcgggtcgaagaacccgaaccgtccagcgaggcggcgcttcaaccccgcataggtgtcggcgtcggtgaccgggctgattgggaagtagacgtggaagcgaggcctggccgacagcgtccttttcggcttctggtggttacggctggtggcggtcatgaactcaacccccgccatcagctcggccaggtcatctggggtgatccactcgtcggggttgtcggtgtggtcgttgtcgatatccatcacgacacagtccgaggagatgaagctcgccgaggagcgccggtcgccggtgtaggtggcggcgacgtgatccaaccacgccacctgctccagcgaggtttggtcggtgatgtggtggtggttcgggtaatggttattgtgcgggttgccgctactcgtggcggcgcacaaggtgaacggagtcatgcgggatgcacctcctggaagtcggcgtcgaagaagcggatcgggatatccatctgatgggcccagtcgatctccgcccgcatccccgggctgaccctgccgatataggcccacagctgctcgcatttcgacagcaggatgcggttgaaaaacatcgccagctcccgggcatccgggtcggtgtcatccatgaactgcggataatgcaaatgcggagccaacgggatctgacgagcctttaccgcaaacgcacaaaaccggcgggcaagctccacgttggctgctatgtcacccgagtacggggagcagatgtagaccaatgggcggtagccgtattcggcgagctggatttctttcagcgcctggtagcaggtcgggtcggggtatccgtcggcgttgcgcagcggaatacccacatcgatggtggcgatcatcaggcgccctgaccttcacgttcgatcaccggcagcaggccacgggtgttcttcaacaggtcgtagatgaacaggcgacccttctgcgtccagtacatgtgggtgcgggtcttgccctcgtcgtactcgtgcgtcttggactgcgtgtagccctgctcggcaaatttcgcgtagaggaaccagcgtccggactggtggaactgcacctgctcctcgcgcagaatctggttaagcttcttcgccgacagcccgtagtccttggcgatctctgtggcggtgatcagtgagggcgatgccagcacgatgtcgtagtacgacaccttcggtgccgcctccaacaaagcttgctcggcggcgagccgcttggcacgttcagcccggagcgtggtgatcgcccgctccagaaactcgtcgtcagcgagcagttcgtcgatggcgtagataccatgtcggcggatcgtcggcagaacctcgtcgaacacccacgtctcgaacttctgggcggcaggaagtttggaagtgacgatcagccggtacaggtcgccttcgctgatgaacctgacctgctgaaccccacctgctgtttcaagggggtagtgattcacgactcccttgcagtgacgtgccagagcgtccttcgtgttggcgtagccgagggctgtagccacgtccttgccgcagaacaggatctgcccgctagaggtgatggttcggattgtgccgaactcgtggttggtgaacacttgtagtccggtagccatgaccagctcctattctgagagccaagtagacaatcggcggcgcggggtgcgccaggctctcacctgtcaggcacggcagacaccgaaaccggacacggcttgaggaaggctctcgcccatacgcccccgagcaccgacaaatccggacgggtcagagggcacactggtgtgtgaacgtaccgataactccgtgccccgtgctcttgcttcggcgtcatcaaccaggtagccttgtagtcaacatgaccggttccgctgcccgcctcggtgggagtccagggccggtcttcgtttttcgtatcaaacaggggtgcgcgtggagcaggtgaagcagttcaagacctacggtgaacaggtcgaattgcttcgtcagcgtgggatgcgagtgaatgatccccagcatgctgagacgctgctggcgcgattgaactactaccgcttgtccggatactggtacccgatgcgccgtttctcccaaggcgacggcactgcccgagatgaattcgttgagggagcatcgtttgacctggtggtagccctctatgggtttgacgaacaattgcgccacagcgtgttcatcgagcttgatcgcgtggagttggctattcgaaccaagctcggtcacgaactgggtcgccttgacccgctgatctatttggatcccaagcgtttgagcgcccgggcacggcagcgaaacaaagacgggcgtagcgtgcacgaggtgtggctgagaaagtaccagtcggcattgaaagcgtcgaaggaggacttcgtcgcccaccacaaatccaaatatggcgggactctacccatctgggcggctgtcgaaatcatggattgggggatgctgtcgtacctgtacggcatgtcgcccaatatcgtgcgcaaacggattgccgagccctgcggcctaactggtcctcagcttgaatcatggctgaaatccttgaatattctacgtaattacgcagctcatcatgcaaggatgttcaaccgtgtttacgacatcaaaccgaaactgaacaatggcgtcaggctggctccggtagctgaaggaatgaatcgcgtgttcgggcagctctcccttatccaatacttgcaccgccaactggacttgtctccagccgaccggctaccgaagctgttccacacctacccgcacaatcccatcgtgccgttttctcgcacaggagcacctgacaactggcgcgagttgcctctctggtgcgtctaatccttgcggtagtagtcgcattcgtacccgtcggcgtcgagtggcagtcctgctgcccagtcgggtggggtcgtcatgagctggcaggcatcggcgatggtgaagccggagtcctcgggttcgtcgatgacgatttcgtcgtggacgtgcatgacaatcttgtgcccagcctgagcgacgagtgtcatggcgtggacgaggaggtcacgagcgactgcttggacgatgttctcgacgagtttcccgccgtaggtctccagccgcccccacttgcgtccggtcgtgacaccgctgtaggtgatggaggtgccgccccaccggttctcaccaagctggggcttcacgtaggccagccgcctaccagagggcagggtgatgaacaagatgccggactcggcagtgaagcgaaggttgcgcagccgaacagcctggcgggtggtgatggcgtcaagtgcggcctgctcgacatccgcccagagtcgcacgatgttggggttggctgcccgccaggcgtcgacgatgggtttgagttcgtgctcggccagccccatccgtagggcacccatcgccttgagcgctccgacggagccgttgtaaccgcaggccagcgtggcgatcttccccttctggcgcagctcagcgttgatgccgtgtttttcgacggggacgccgaacatgcgcgacgcggtctcgcagtagaggtctttgccgtcgcggaaggctgccagggtggatgtttctccggcgagccaggcgatgacgcgagcttcaatcgcggagtagtcggcgacgatgaatcggcatccggcgctggggatgaacgctgtccggatcaactggctgagcgtgtctggcacggagtcgtagagcagttcaagggcgtcgaggttgcgttgtcgggtgagggtgcgggcttggtcgaggtcgggcaggtagttacggggcaggttttggacttggacgaggcgtccggcgaatcggccggtgcgtcccgctccatagaactggataaggccgcgtgccctaccgtccgtgcctgtgacgttatgcatcgcctggtacttcttcaccgagcttttcgcgaggtcgccgcgcagctccaggacttctttgaccttgcccgtggcggactcgagggcggcttcgacatcagccttcgccaaggacgacatctcgcagccgtgggtggtgagccattccttcaactggatcggtgagttcgggttctccaacccggtcaactcccgcgcccgcgccaacgtggcggcacgatgctggtcgtccagggcgacggcagcgtctgcgagggtgtggtcgagcaggatgccggtgtcgttgatgcgttgatccagggcgtaggcgtcccactcggcttcgggaatcggaaacgatgagagccggtcgtggatcgcgagttcgacctcgacgtcgcgctggttgtagtcgatgaactgagcccagctggtcgggtcgctgctgggcaggttacgggtgccgccaccgttgagcacgctgggtgtggctggcgtgcagaattgcttgatcagccgcttacccgccgtatccttctgaacgtcaaggtcaagagccgcaccgaccgcatccaagctcatcggcagaccgagttaagccgaccacaccatcgtgcagcgccactggctcgggtcaagaaacccggccgccaacagctcggggtgatgacgctgcagccacgcggagagcgcgacccgctcgaaggcggcgttatgcgcccacttgaccacgcccgggtccaccaatgctgcgagcacctcgtcgggcagcccaccaccactggcgagatcgacgacttccaccgggccgccgtcgatcgagtagccgaagatgaggaggcggaagtcggggtgttcggcatacgggtagacgccggttttcgctaggggtgctgggctgaaggtttcaatatcgatagcgatctggcgcatcagggctcctggacagtcgggtaggcgaaggtgagggagccaaccggtgtttggtggctccctcactgctggggtgctacttcgggtcgaggttgtaggtggcgttcatcctgtcgagctcggccttctccttggcgatcagctcatcgatgcgctgacgttcgcggcgtttggcccgcttgtccttaatccagtagtagccccagaccatccagaacgggatcaggacgtagacccacacggcgagggtgatggcgttgaaacagtcactcatgattcagcctccttagttgaggaagtcgtcggccggcgcgccgaagtcggactcagcggagacgcggcctgcgccaaggggttcaccgtcgcggatcttctgaatgttgcccagcccgcacgccacacccttgttcccgttcgtgttgaacgcgtagaacgacagggagacgcgggcgtagcaacccgagtacacctcggaacggtcaaggatcggagagacgttctcgtccacaacctgcggcggagtgaggctgttggcgttgacgaagaagctgtttgcgtaggcttcgtcgtcacgctcggtatccccgtcacgcagcggcagcttcagagccgccttgttggagcgcttgcctccgaacttggccgtaccagcgtcgatcgccgcgtcgatggccttctcgatagctgtgatggtggtggtgtcggccttcgggatgatcagcgacacggagtacttgggcttgccgccctggatggagttcggctcccacacgtgagcgtaggagaggcggacttcgccggtgacgacgcgggtggggttgttggttgacaaggttgttacctgctttctgttttcgtgaattcggtttgtacgctgtggatttccagcgcgggtcgtttgtcggtgtcagacacgagcgtcggcttacccacgggcttgaccacgaggtcgccgagcacctcgttgaaggtcttcttgtccatgagccgttccatcgcagtgagcgtgatgagtctgcggtcgtagatgtcggcgtacccggcagcttcagccgcttcggcgacggcgttctcctccgtgtacttgcggacagaccgtccggcgacgagcttgaaaccatcccagtgcttgccctggttcaccgcctgcgagagcgcgtaggcctccacatccgcagcccacgttttgagctgtggaatccttgtcagcacgtccgcaatctcgctgccggacagctcggccggtggggcgaactcgtgctgggcgagcgcgaggttggcttcggcgcgtgctcggcacgtcggtgcgatgcggcagaactggcaccacgagccgggacagaactcgcccccgcccgccgcagccaactcggccttcggcttcacctcggtctcagcccatgcgaggaggtcggcgacgctggtttcccaagtgtcaacgttgccccgccggggctggtagatcgtcaccgcaacatcggtgatgtcatacaagtccccgaaagcgtggacggctccgagcgcgtacaacatgagctgcgggttgtgtgcggcctcgacgaggatgccctgcccgtacttgagatcgatgatctgcagcttgggttcggcgatgatcacgcagtcgccggtaccgaaaccgcccggcacgacgtgggagaagtcgaggcgctgctcgatcagcacctgcggatcaccacaggcctcccgtgccagtgagatgtgttcctggacgaaggcgacgtagtcgtcggtcaggtcctccatctcggtatcgatccagccggactcgggcttgaaagtcggcgcgtcgttcagggcacgccggagcttccactccgccagggcgtgtgcgacggtgccctgctcggccgccgccgacgtcgagtccggctcacgggattccagcaccgcgctgggtgggcagttcagccaccggtgcgcgcccgacgccgagagcagcgcatgctggtcaggcatcggacagctccttcgccttggccagcagccacccgtacttcgtcgggtcaaccgccgacagcttgtccgcgccggtggcgacgatcagctcacgcacctgctcggtcatgccttggctggagagcccggcgagcactccacgcacctgcgccagcgacaccggctccggctcaggtgccggttcgggtgcctgtcggtgggcggcctcgtactcagcggcggcctgctccaggtcgggttgtgcgagcccggcggcggcgatcggacgagcgccgggcatcccggcgtgatcctcgaacccctcccacgcggtctcctcaattgcggcggcgagcatggtgacacctgccgcgtcggccagcgccatcaggtcgtcgtcggtgtcggcgacacgcacctcgacggtggaggcttcggagccgggcaggagcacggccatgcggtgctggggtcggctggtgccgaagatcgcgcgcagcatccgcctgctggggcggatttcttttgcagcgagtgcggcagccgggctgggatgcttggcgatcttgatcttgagcttggtgggcatccgggtttccttccatgtgagtggtggtacgccccatcaccgggctggtgaagggagtgccttgcatctgtcaggcatgggacgcaccgaaaccggacggcctacgactcggtgagtgttttgcgcagttgggccagaccgcgcgagacggctttccgcaccgcatcggcactggtcggctggcctgcgccggtcttgtcggcggcgatctcggtgaaccggtcgccgtggagcacatgcagctcgatgtactcgcgctgcgtcgcagtcagcggactcagcagttcgaccaccgcgaggttggcctcgacctgctcggtgaagtccggatcgtccgaggcgaagtaatccgcgcccagcccgccacgctcgtcgtcatcaccgtggccgggttggtcgacggagatgtcggagcggcggcgattgtccagctcgcggtactcggcgtacacgtcgtcgaggtaggcgcgagcccacttcggacgcgaagccgggtcgcgcagctgggcacgcagttcttcgctgtcgggcaggtcagggacgggtaggtcgatggtgttgcccctgggggtcaggtacgggacagtgaattgtctgttgaatgccacgtgagggcttcccttcttgcgaagggagaccccgttgagggcaaccgacgagagaccgtggtgttgagcggaaacagtgacgggcaccaacccgacccgggggtgaacccgggtacaggtggtgcccgtcaagcgctcaacggaggtctcccgaatacggttgaaaaacgcatgcgggtgtaggaggaaggcggccggccggtgaccggtacggctttgaccgccacagcggttgggctgtcctgccggatgacgtctggccagcaggacagccgtgagggctacttgcccttacgcggcttggcctgagccagcgccgaggctgcgaccgacttcgtcttggccgaggtgcgaccgtcgcgcagcagtgcggacgccttcttggcgaccggtcgagacgtctgcttcgtgtttcgtgtatccatgtccctgttcacctcctgcctcagctcgctccgacacggttacgcgttcatgaagatgaacgcgacaagagtgaagcggccttgtaagatcgaaggaacacaggttcgctgttcgcccttgtggttctaggttccccgatgacggttttctgatcggctgggaagcgatgggcagcgatgggtcgcgatggagaggcggtgcggtggattacaagtcgagcttccacgccgtcttggcgacggtgcgcccgctgatgaaaggcacccgtaaccttggcgagttcaccgcaggtctcatcgacatgggactcgtgcctcgcggaaccgtctacggcgagaagaccgcgcttgagatgcgcaagtcggcgacgtggaaggggtacgccaacgggtctgaccagctgcctactgtgttagcgagcgagctggctgggcgatgggatcagtttcggttcgccagcaacgtctcccaggcatacgaggagtcggcactcaatgacctagccgaccggctccacgaccttgacgagtcgatcaacaagggcaatgtcaccgaaggtctaggccagctgttctacaaggtgttcaccgaagctgccggtgagaccgctgccgtaacggagcccttgactttggcagacaaggccgaccgatctggcatcccgtacattgacgagaagacgaatcgcctcaggcttggcgaccgctcggtcgcgttaccgccgaagcatcccacaccggacacagttcagcctgctgagctggggtatgtttcggcgctcctggccgcgcattgcgaagacaaagcccgtaccggcgttgaggtgcagctggacgacatcccgtcgcgtctggttcaacacttccaagaacagcgcaaagcgttctaccgtgccgaatgggtacgagaaacatcgtggaactgcatccacgatgggcggccattgtttgacgagttcttggaaacgatgcacgcgggagtctccgacaccaacttgcgtcagtaccccaacggactcgaacgcctcctcgcgacactggctcaagcagccgcagtccaactcgacggtgtccggctcgaccagatcattgacctgatcgacgtgtggagccggaaaggttcctgccacgaactcgtcgcccggaaccggctgggatgggtagattgatgcgcgccacgtccctagacacaagtttcgaagctgaactgcgcgggctcatcttgctgttcctgctcggagatgcagcggatgccgactacctgggtgccctagacaccatcaccgtcaacgcccacaccttcggggtcggggcagagaacctcaacggcacccaccgactggccagcggggaactccacacgcgcacagtcctgatgacccaagctctccagcatttggcgatccaaggattcgtgacactacagccagatcgttctccggcggccttcacgattaccgctgagggtgaatcagtcgtcaaccatttccgctcccgatacgccggtcagttgttcgacaccgcgttggagacgatcgagcgggttggcgacctgagcacgagcgagctggctcagatcatcaggtcagcgaccccggaaggagaaacgcgatgacaccaggcttctggatcagcagcatcaccgtggccgggcaccccactcggcgggactccagcgtcggtttcgaatctggactcaacgtcatctacggaccgtctaactccggcaagtcctgggtgcttcagtgcatcgactacgtgttcgggctgaaagccgacgagttcgtcctcgacgaaaactccggctacaccgaggtgcgtatgggggtgcgcaccgcgcagggctcactcacgttatcgcgccccatcggtgagggagccaataacatcgaggtctccagcacagacccacgaattgagtctggaacctacaaacgtcaatcgtctggccgttccccgctactcagctcggtgtggctcaaactcatcggctacgacgcccctgaaaacctgaaaatcatcaagaatcaaaaccttgaaacccaggcgttgacgtggcgcaccttctggcatgcgctgtacgcggatgaagaccggatcagcaccaagaaaccaatccttctccctcttcagaccaccgcacagcccgcgttcaaatgcgccctagcgtcactgatcaccggcaaggactatgccgcctacgctcgtgatgagtctgtcgaaacgaggaaattgcgtaacaacgcgatcatcgactacctcgagccgctacccaaacagcttgaagaacgaatcgagttgatcgacaaagcactcggtagcagcgacccagcagagatccagcagcgcatcgatgagctgatcgcagaactggaacgtgtccagcaacgcatcacacacgccaccgtgcaggggcaagacgtcatcgcacgcctccaacaggtgcgtgactcgctggcggaatcccgcagtctgcggaaccgatacgaggaacttgccgcctcctaccgtgcccgcatcgagcggttcgatttcgtcgaggaaggccacgccctcaccgcacacagggaaccggcaacaacctgccccgtatgcacgcaggcactaccaccggaagcgcgatccgcagttccagagcccgatctgcgtgaacgccacgacctagctgcccgactcaacgatcttcgtcaaacgatccatcagatggatcttgaacaggcaccactgcaagaacaagagcaggatctcgccgcagaagccgagcgcatcgcccggcgcatcagcggcgagttagagccgcaactgcaagccctctcgacttcgcttgccagccacaacgcgatcatcgccatgcaggcagaaagagaacagcacctcgaacgcaaacaagccatcgaagacgaacttgaagaacgcaagaatcgcacattccccaagggcaacttcaatccgctcgacgaatacccgaaaacgttctggccgcagatgggcaccaacctgctcgacatccttggagcctgcgcgttccccagactcaaagatgcccgattctcgcgtgaactgttcgatgctgtcatcaacggcaaaaccaaagcggaggaagggcagggctaccggtcgttcgtcaacaccgctgtcatgctcgccctccgggaatacctcgcctccgaggacgccacacacaaccccggcctgctcatcatcgacaccccactactggggctcgacgatccacagctcgaccccgagcttcaagaagcccgtgaaaccatccccgctgccctctacgactacctcgccctcgaacaagacggcggtcagatgatcatcgctgacaacaccaagttcatgcccgacatagaaccactaaaggaccgatgcaaactcatcgtattcacgaaacgcgaaggagaaggacgctacggcttcctgctcgatgcccaggacgaagacctgatcgatctggaggaaacagatgacaactaaccgcgccttcagctacaagcccctctggaaactcctcatcgaccgcgacatgaacaaaatccaacttcaagaacgtgcaggcatcagtccagccaccctgtccaaactcggacgcggcggcaacgtcaccaccgacgtccttgcccgcatctgcgaagcactcgactgtgacatcgccgacatctgcgaggtcgtccccaccgacctgaagggagagaccgactagatgaccgctcaacgcctgcagctcacctggtacaacaaggacaaggctctcatccccactgagaccggcaagtacggctacacgtgggttgacccctctgatccgcgctactgcgaaacccacaccctcgtgctggacgactatgtgcaaggcagccagacaccgaagtctgacgagttcgcctactccgagcgcgctgacctggagccccaggatgacaacctgctgatcttgggtgaatcgggcgatgtcctcgaagccctcacccgcgtgcccgagcttgccgagaagtacgtcggcaaggtgaaactgatctacatcgatccgccgtttaacaccgcgcagacattcgcttcgtacgaggacaacctagagcactccatctggctgaccatgatgcgcgaccgactgcaccacatgaagaagctgcttgccgacgacggctccatctgggttcaccttgactacgcggagaaccaccgtatgcgactgctgctggatgaggtcttcggttgctcaaacttcattgccgagttcgtgtggcagaaagcagactcgccgcgaggtgacgctcaacgtgtttcggtggatcaagatgtgatcctttgctatgccgcgagtggaagcacagtcatgaatcgtatggaaaggactgccgcagataacgcccgcttcagtaatcctgacggcgactctaaaggtgtttggttcagtgataaccgctccgcgcccacaaacgttatgtcttggcagcaccctagcacctttgcaattcagcacccaatcagtggcgagatgatctacccggccaagggtggatgctggcgttttggtagagaacgtctccttgagtcattgaacgagtacgcggagtatgcaagcggtgatgtagacattgcggctcgggttgcaaacacatcgcttcggtcagatcaggttcgttcagacattcctgacctggtattggtcgaccccgcttcagcggctcaatgtgctcgcacaagaattgatgatggaaattggccagaattcttcgtgactgcaaccagcttcggcagaaagtcctatcctcctaatgaaggtcagcctgcccgttcatggtggcctaatgatcaggtgggacacaatcgcgaagctaagtcagaaataaaggctctcttttccggtgcgacgcctttctctacccccaagcctgaacgtctcctcgaacgcatcattcatatcgggtcgaacccgggcgacattgtgctggatgtgttcgctgggtcggggacgacggcagccgtcgcgcagaagatggggcggcgttgggtgacgtgcgaattgctggagtcgacgttcacaacgtttacgcgtccccgtctggagaaggtgctcaacgatcaagacccgggcgggatcactcggactaagggcgaacgagtcgacgctacggaagacgggctgcctgatggtgtctcgccggaggacgccgcgaaattcacgagcgtgctcaacaagctgatcaaggacgacccggaattgaagaaaagcatcgaggtgaagacactgaaggctgcctcgaagaccagacgcacgaaggaagtagtgaactggcgtggtggcggcggcttccaggtcgcccatctgtcgcctgcgtgtttcgactacgcccctgaactggaccgggtgatgctaactgcggccgcgaccggacagactctgatcgagtcggtgactgccaacctcgggttcacactgttgcacccggatgatgactatatttttgatgcccgccgtggcaatgccttgttgaaggtggtggagggtgtggccacgaccgagatcgttgactggcttgcttcccaaatccagcccggcgagacaatcgtgctggccgccaccacggtgatggacggcgtgcgccagcatctgcgcaaactggtgaaggggtcgcgggtggtcgcattgcccgatgatgtgtttcggtacagcgaaggtggtgaccagtgatggcgaacaggctcaacatcagttttgactccgacatgctggagtcgatcagtgccgagttcgacctgcgtgctccgaacaaggaagcactgcgccagctggtcttcactctcgacggtgactatgacccgaccgtgatgcaggtgctcaacctcgctacgggcgtgggcaagacctacttgatggcggcgtttgtggagtatctgcgccgccaaggtgttggcaacgtggtgattgtgacgcctggtaagacggtgcaggccaagacggtgcagaacttcacgcctggttcgtcgcgctacattactggttcggcgcttccgccggaggtggtgactccgcaggattattcggcgtggatcgcgcgtcaaaacggcccggtgcaactcgcgttcgggcgagagactccgatgttggcattcattttcaatattcagcagttgattgcccctaagtctgatgagggtgacactttgggtggtacgcaggatgcgatgcggcgtaagcctcgccgtttcgatgagaacgccggggtgcttttcgattatttgaagggtcttgatgatctggtcgtgatcgctgacgagtcccacctgtacgggtcgagtgcggtggcgttcaatgcggctttaagagaactggatccggcggcggcgattgggcttactgcttcggtggataagaaaaccgatcacgtgatctatgagtatccgctgtatcgggcgatccaggacaaatacgtcaaagccccggtgttggctttccgtaagagtgggtatggcacggacgaggcctctgaggaacagcagttgcgggatgctttgcagctgcgggcgatcaaacaagcccactatgatgcttatgccgccagtgaaaaccgtgctcacgttaacgccgtggtgttcgtcgtgtgttcggatgtggaacacgctacccaagtagcggagcttttgcgtaccccggaatatctcgggcgtgacgaggcagtgttgcaggtggactccaaacatgaggacgagctgacgcagcgccgcttgaacgagctggacctgcccggctcgcccgtgttggcggtggtgagcgtgaacaagctcaaggaaggctgggatgtcaagaacatcgcggtcgtcgtgacgttgcgggcgatggcttctgaggtgctcactcagcagacgatggggcgcgggctgcggctgccgttcggccggtatacgggtgtgtggcagatcgaccagctcgacatcatcgcccaccaatccttcaccgagctgctcaacgccgagaacgtgctgcagcagttcggcctggacgaagccatcgccgagcccgacaaagccaaggtagaagaggcgatccgtaaagccgccgaagagtccggcacgggtacaggtacgcccacgaccggcggtgaccaaccaacgacgacaaccggttctgaaccgggcaccggtgtcagtggtgaggtcgccggtggtgtggctccgcagccgggcaccgttcccgtcggcggcagtgattccccgggtgcgggtttgcccggtatcggggttcgcaccatcaccgaacaggaggatcagcccacctgggagttggtttcgatcggacggaacccgagctttgctgacgtgtcctaccgattcccggtgacgacgatgactgtgcagcagccgcccattgacctgtcagaaatcagtgacgccgagattgagcaagcggcgcgtcgggtcacctctgctggggacgtgctgctgcgcaaagagatcatcgccgccctaggcaagaaactccgggcagaggatcgagaaagcgccgaagtcgactccgtccacgtcgacgacgccgacgccgaggaggcgctggtcaaactagtgatcaacatgtcgctggtgcccaaaaccgaacagaccgcccgctacgtcgccacgttcctggtgccgaagttcatgcgcaccgtgacgttcaccggctggaccgtcaaatccctcgactccgcccgcgccgaactcctagcgctgatcaagaactacacaaccgagacactgcgagccacccgcgaggtgccgaccatacaccccaagtcgatgccaggcaccggctacacgctcccgttgggtgagaaggtgcatgaccagatcgagagtcgtgaccagttcgtgcgaggccgggtctacggcggctggttcaagtcgctattcgccgaggagtccttcgactccttcaccggcgaataccagcttgctcgcctgctcaacacgtcgccggggatcgtgtggtggcatcgcctgcatccgcaagaccaggcattcgtgtactacaacgcgaaagaccgctacttccccgacttcgtagccttggacaccaacggggtgcattggatcatcgaaggcaaggacgagcgcggccgcgatgacgccagggtgcaggccaagcgtaaggctgccgaggcgttggtgcgccggttggtggctgaggatgcctacgccggtcagcactggggctatctgatcgcctacgagcaagacaccgcccgtgccgactcgtgggaagacctgaaagccttcgccagcccggtcagcaacgccctgtagctgcgagttcgcctgggcgcatcacggggctccagcgttgcgggaggtcgagggtgacggcctcgccggtgatgaacacgaatccgagcctgccatcggtgagcatgcagccgccctccagcatggcaaggaagtccgggatgtggagcgcaagctgggtcggcgattcggtcaggagcttgtcgatcgccgtgtggagcgtcgatgggcgtcgccgcgcacccgttgactgcaggctgtccacggcctggtcaaccgccgtgctgttgcgcccagcgagcacctgcaacgcctcggccatcttcaccagcagcacctcctggtagaggtggctggtggtgcaggtgccgcgcttgacgtagttcgtggggcactcccacacgtcgacccggttcggggtaccggagtgccaggtcttgtggccgaacggccgtccgcagtcgccgcagacgatcttgcgggacaggcgcttgccgaaggacttgtagccgcgtgggtcgacgcgggtgcccagccacggcaactcgcggtctgcaatgccgagagcctcggcggcgtggcgttgggcgtggaatgcgtccatccactcgacggtgtacccggcggcgagattttcgaggaggaagctggtcagccggtaggtcagtcgggcttgtactgttgcgagttcggggtattgcatggtgggggctcctgtctttgcgtcacgtacatacacgctctgatcagggctaatagcaagtcgtaaacggcgataccttttagcgcttgccgaactatttggcgctccgttgtcagcctcgacgcacgtggttcacgccgccccacagcgcctctcggacaagccagccaccggagccgatccgtccgaatatgcggctcgacggtcaacactaaggcgcgttttacctagtggggagcgggtttcgccccatctgcgtcatccgcgcaccacaaacccctgtatccacttcgatacagtctgc

SEQ ID NO: 68 - DNA, 32951 bp, Propionibacterium acnes
  source 1..32951: mol_type = genomic DNA
ggtggtgccgaagaagaaggaatggccccaccaatctgctggtcggtagaagtacggggtttgagccagtcgagtagtttcataatctgctccttgcaaggtattgtgaaggatatgaaatctcttacccctcatttgcttctctgctcttttttcacaagcattgctcctgccttaggagaaggatttcgcaacaaacgtgtggctttcattccgacagcagcagcccacgaggagtacacagcctacgtggattcagcacgctcatcatggaaagaacttggcagcaatatcaccgatgtggatattgccagaatgcctctaagaacagcgaccgaggcgcttgagcaagccgagataatctatctttcaggagggaactccttctacctcctcgattgcctacgctcaacagaaatcgaccagattattcgagggcgtctggccgaaggggcgattctagttggtgaatcagctggagctatagtttgtagcccaaatatcgcctacattcagccaatggatcgtgtccctgacaactacagccaggctgactacaccggactgaacttagtggacttcttcccggtacctcactacctcgcccctccatttgtgaagagttccaaggaagtagtcgcccagcacgctagcctcccactcgagctcatgaacaacgcagaagcggtaatagtagagggtccccaaaggacaaagatctcatcagagcaccagtagtcctcgtgagtcgtacaccgacgtgcccgtgtggctgccaccgcctcggatagcgcggtcgagggccatgatggtggcgaccacctcgtcgatcttctcggtggacttttgcttgtcgggtttgatgtttcctgccgggtcggtgcggacgtgaatgttgtcgaccatccaggacagcactgggtgcctgccgtgagcgagcctaccttctagtgcgagtctcatgagctccttggacggtgggctcatgtctttgaagccttgcccgaagggcacgacggtgaacccggcatcgtcaaggttttggctcatctggactgcgccccacctgtcgaaggcgatctcgcggatatcgaagcgtgtcccgagttgctcgatgtggcgttcgacgtgggcgtattggacgacgttgccctccgtggtctctaataagccctgttggtgccacaggtcgtagggcacatgataacgcgccacccgcaacgccaggttgtcctccggtatccagaaccacggggcgatccggtacttcttcgtccccgtagggtgggaagatgaggacgaaggcggtaatatccgtcgtagaggcaagatccagcccgccgtagcagcgtcttccttccagctcgtccaggtttaccgggtcggctcccgcgtcccagatgtgcatgggcatccaccgcaccgactgcttgacccactggttcaacctgagctgccggaacgtgttctcctcggcagggttctgccgggccgagttgcacgccgcgcgcaccttgtcgatcggcaccgtcacgcccagtgaggggttggctttgcgccacacggcctcatcggtccaatcatcatccgcgtcggccccgtagatcaccgcatagaacgtcggatcatacttcttgcccgcgaggatgtcctggactttctggtgctgctcatagcaaatcgaatgcgtatcagttccggcggtggtgatcaggaaatacagcggctaggtgcgtgcgtcgcccgaacccttggtcatgacgtcgaacagggctcggttgggttgggtgtgaagctcgtcgaagaccacgccggagatgtcgaacccgtgcttgaagtaggcctctgcggagaggacttggtagaaggagttggtgggcttgtagatgattcgcttctgcgaagagaggatcttcacccgcttcgacagggctggtgattggcgcaccatatcggcggcgacttcgaacacgatcgaggcctgccgccggtcggccgcacacccgtagacttcggcacgctcctcaccatccccacacgtcagcagcagggcgacggcggcggcaagctctgatttgccctgcttcttggggatctcgacataggcggtagtgaactggcggtagccgtcggctttgacggtgccgaacaggtcacggatgatttgttcctgccagtcgatgagctggaagggctgtcctgaccagcggcccttggtgtgtttcaaggcttggatgaacgcgaccgcgaagtcggctttccgcttgtcataggtggagcctgcggccatgaaccgggtcggcgtgtaggtgtcgagagtgcgcatcacgcccgtcaggctccttcctgtgctggttagttggtgtgggcgaaggcccaggcgatggcgtggccggcgtcagcgaacagttcgtcagcctcggcgaccaggtcgagttcgcattcactgaagcctcgggcgtcctgtccccagccggagatcggctgctcggcgaacttgtagacgcgggcgtcgtttccgatccggcctttgcccaagtgccggtaggccgaggcgaggacgaagtccccgtaggcgatcaccgtgccgtagctgtcggtcgccatctgcagctgctccatcgtggtcttttcgttgttcatgaccttctccttcttgccttgttcggtcatgtacatacagccataggtgcgcgctcttatccagtcgtaaaagccctagtcagcccactatttttgaggaatctttgaggggcgacgggcacggaaacggcccctgattgggtgggtacccacggtggcttggggtcagtcgatggccaggtgccaggcggggatcatgcggcgttccccggtgatcgggtctgggtagcggtcgttgacttgggtcatgcctcgcagggttgcccctgcctgggtgaggttccagatgatcgtggtcaggccggtctggttcgcgctgatcgtgaactcgccgatgctgtgctccttgagttcgtcgaggatgctgggcacgtctgagtcgtagagaccttcggcgaagtcgagcagctcgttgcccgcccgctggctgttcatgtagacggtgagcaggctcgtggacgaggtttgggtgcgggtcgcgatcttgctggtcgaggtcgtcaattgtgttcatcgcgggtgtccttgtgggtgggtggggtgcgccaggcggcgttgccgtccaagtgtttgagcaaggtgcggcggacgggtttggtgtcgtcgccgatcagaccgaggcgcagcagccagcagcgcatcgcatatttgtcgttcccgcccgtttcggcaggtttggctgaggctcttgtggcggttttggcgtggtcgatgatccgggcgatcagcaccgtggtggcctccactacctgcgggtcgggcgctacgtcgaaccaggggaactcgaccgtcccggcctcggcgtcgatgctcatcggggttgcggggatctggagtgctttggcgatgagctctcctttcgctgctagcgtcgcctccaccttccctttcgtggtgtcctcccaaccggtggtggggaacgccaacgtcaaccccaactcgcctggctcgtcggtggtgtccgtcgggaatccggcctgcgcggccgcctcgaccagcccggccacgtcggtgtcctcgggcagatgcagcagccagtcacgatccaacatggcctcgccaatctggtaggcaaacgttggggttcccagatactcgacggtcgctcgcagctgggtggcgagaaaagcggcgagttgcttgcggcctttgcgctgcttggtgaacttgagtgtcgtcatgaccggcctcctttgcgtgttcccctggtcggagtggttttcggtcatgtacatacacgctctatcccgaccagatagcaagtccggacggccacctatttcttgcctcgatccacggccttcaccacatccaggtaggccaactgttggccgtcgcgcaggcaggtgatacctgcggcgtccccggtggcgtcggcgtagcggcgcagaatgactgaggcgtatttctcgtcgagctccatgcagtaagcgatccggttggtggcctcacacgccatgagcgtggagccagagccggcgaacgtgtcgagcacgatcgcattcgcctgggtggagtttccaatcggatacgccaacagatccagcggcttcgaggtcggatgatcagcattcctgcgaggcttatcaaaccgccagacggtggtttgtttccgatccgcgtaccacgtgtgcttgcccgtcttcacccagccgtagagaacgggctcgtgttgccactgatacggggaacgacccagcaccagggagtccttgacccagatgcaacaccccgacagcttgaagcccgcgtcttgaaaggcgcgccggaagttcagaccttcggtatcggcgtggaacacgtacgcggacgcgcccttctcacacacgcccgccatctgagtgaacgctgcgagcaggaactcgtagaacgcgtccgcgctcatcttgtcgttcttgatcgacaagccgtcagacgattcgaaggcgacgttgtatggcgggtccgtgagcaccaagttggccttcttgccatccatcaacagctcgatgtcgcccgcgttggtggcgtcgccgcacaccagccgatgcctacccaccgtccagatatcaccccgctcgacgaacgcggcagcctccagggcggcggtcagatcgaagtcgtcatcctccacctcgtcctcatccaaggagccgatgagctgggcaatctcatcgtcgtcgaacccagtcagctcagcgtcgaaatcactcgcgtccaggtcggcgatgagcagggcgagcttgtcctggtcccagtcgccactgatcttgttgagcgcgacgttcaaggctttttcgcgggtctcgtccaactcgacgaccacgcagtcgacagtggtttcaccgaggtcttcgaggactttgaggcgctggtggccgccgacgacatggccggtggtcttgttccagatgacaggttcgacgtatccgaactccgtcagcgaccgcttgagcttttcgtagtcggggtcgccgggccggaggtctttgcgcgggttgtagtcggctggcgtgaggtcagcgatgggtagctgctcgatgcgcacggggctccaccgccttccgcaggtcgcgctcaaaacgccaggtttgttcccagcgcggccaatcccggcccatgtgcccgtagaccgcgagatcccggtaacggggtgtgcgcaggttgaggacgtcgatgatccccgccggccgcagcacgaacacgtcacgtgcggcggcggtcaagatgtggtcggcgtactcgccggtgccgagcgtgtccacctcgaacgcgaccggatcagccttcccaatcgcatacgagatgcccacctcgcactcagcggccagcccggcgtcaacgatcgtacgagcgatcaggcgagccatgtaggccgctgaccggtcgaccttggatgggtccttgccggagaacgcgcccccaccatgagacccgagcccgccgtaggtgccgaccatgagcttccggcccgtcagcccggtatcggctcgcggcccgccctcaacgaaccgacccgacggattcacaagaatttcggtgtgctcgtctatgggtaggtaggtctggcaggccggggccacaatcagcgagcgcacctcacgctccaacacggccagatccttgcccgcctcatgctgcaccgagaccacgacggtctcgacggcggcgggggcaccggtgtcgtcataacgcacactcacctgggccttgccgtccgacttgatcccgcagatcgtcccctcgacctgggcagtatcgagacgctcgcagatgcgatgtgccaggacgagcgggagcgggaggcgttcaggggtctcggcggtggcgtaaccgtagaccgtgccctgatcgccagccccctgcaacgcgaacgccgaactatcaccaccgcgtgcctccagcgaggtggtgaccccggcgttgatgtcgctcgattggcggcgcgtccacacgtagatcaggatcccgagcggactgtatccggcacgcgcgagggcggtgcgcacagactcccggatacgcgggcggtggttggtggtgatttcgccggtgacgatgatccgccgaccggctgccatcacctccaccgccacccgtgcggccttgtcgtcgtagaggatgtcgtcgaggatctggtcggcgatctgatcggccaacttgtccggatgaccagcacacacagactcggcagtacgaatcgaacacataagcacactcgcttccacgaatcggaggggaacaagaaagcgtccaccccactagagggtggacgcgaagatcatgaggggcggttaggagcgggcgttgagcagctgctccatcacctcgtcgccgggcgtggtgcccgcgtagtcggtggtgcaggtggcgcgcacgatctcgtaaatctcgtaccaatacacattcgcctgcttcccgaaactctgggacatggcgacaaacgggctggcgatggcggcaccggtggtggggtgcttgccgagcaggccgaacttggagatcgcctgctcgcactgcacataccgggcaaacgcctgcgcatacgcctcaatcaggcgaggcgccacgaattgggaaccgccacgttgatcgagccactgccacgtctcccgatagacgaggtcagcgccaagcggtttgccgtcacgctgaatctccgacagatagtccgatggttcgggcatcgtctccccggcaagcaccgcaccgtcgccaatgtcattacctgcgaagtcgaagggttcgttgagcgggtcttccaggcgggtggcggggcgtccggcggcgagtttctcgcccagcgggccgggcttcgcgcctgcacgcacgcggcgtccgcccctgttggtgccgtctttggccatgggtcgcctccccgccgtagaatcgtcatggtttcggtgctgaagtccacgggaggtgtgagtggttgagtctttaaaactattcgttcggacctacgtgtattgggtagggctcatccttggcttcgcgatagtgcccggttctctgctcttcactgctgaagtcgccccggtgaacactccattgtggcttgcacctttcgccgggctgctgctttttgtcattgatcggccatcaacatgggagccgccgctctggcgagcattactgatccgagtattgggtgcaggatttgcagccaccatgctcatcgcgtttgatgcagttgcttccacccactatggatctcaacactggagtgagacgctcctatctttcggtctcggttggattgtcttcacggtagtggcaggacacatgctcatgagcagctccgcccgatttggcacacctgctcacacgatcagggacgcgatccgtacctacacgacatggataggaatctgcttcgggattttctatatccccgccgcgggactctccgcagctggcactcttttgatggttcttccgctttatggaacgttcctcgccggcctggttcttttgatagttgacccgccacgacgatggccgcaaccgcgagtgaaggcactgtggatacgactcttgtcaagcgtggcagcagcattactacttgttgtcacgaactcgttctatcgcagtactcgcacacacgagattttcgtcggggactggcaggaaaacctggtcttcttcgtgggtgcttgggcactttatgccgcagtggctggggccaggtatcttacgcctggccccagccacgaagcagatgacaaactcagtagatgaattcagctagagcttgacatgctgccctcttggtttcttcgctaggctcaacgcccgagtagccgtatgccccattggaaccgtctgtgagaaggccaacgtatctgtcatccaatgggccatcaatttctgcaaagaacttgtcctttgcggttcctccgtcgcttgcaccaacactctcagagatcgccttgaatcgctgcaatagcgaaactggattgttgtagtagctcctcagcgttcgggacagaaggttggggtcgtcggctcccgagcctttcagcatcgcagccagtttgatcgcatccccgtcgctacacaggtcggagtagttgcagttgttcggcagatcattggggatggtcaaaccttgaagtccgctgtgattcttatagttatccccttggccaacaagagcccttgctattgcaataatgtttgagccgggattcaggtcaacaaccttttgaatcggaccgagcgctgaagctaagtcacccgcccatcccgtccacttatcaggaacgagcgggttcaggttgatgtagcccagggtggtcacgctcatatgcgggatatctactgcaccacctgcggggtccgtccattcttgtcgatcggagcgaatccacttattcaaggcagagattatctgagacgcttgagtgtcatcttccagccttttcgcgtccgcctcccgatatgcttcagctgccgcggaccactttgcgcttcccttgaggtagaccgttgataggtagttgaggacacatcgccaagtcggaactttgacccaagtaacgtagctgccggatgtgatcggatcctctccgaaagcgtagtccttatagaccacgcgcaattcctcgaaccggctctcaagcgcttcgatcagatcgagaaaatctagagcgtcgtaattcactggctgcgcgtggcgcaccgacgaatcggctgacatgcgacccgaatatgccacgcggtcaagatcccatttcccccgatatccactgatttcgtggaactgatcaaatacccagttgtcggggatggggaaaccgagattacctgagaatccggtagacatgtcagaaacgaatgatgctaccgcgtatccagcctgagctatccgggtgcagatgtttcgcgaggcgtagatacccactcggtagccgccgccgaggctttgcgttactgccttgaagtagggcaggatgtggctggtcacctgaggatccgtggcatcgtagtcaacggcgaagtagatcactgtaggtggaacaccaagtcgttgggcagcggtttgggcctctttcgcatgacggtgcccattttcgacactaaagtacttaagttcagttgagtactcttgaaaaattgggaaatacttcagcccatgaccaacgattcgctctagctcgcctgtgcggagcgccttgaaatagtctgcctcagacttactgctttggttgggttcactgagatagcggcctacgatctgataaccatcagccttaagatgtccagcaagctcgtcagtgatctcaaagcgcgtatcgcaagccacacatggccgattggggtcgcctttagaagtgagcaggctcatccatgtggttgggtcgaccaccccggtcactggcaaggcgtgtgcttgctggaactgccacagcgtgttgctgatttcgctgttccacgtgctggtcggcaaaatggagtagccgttgcagaccagactcacagtggctagccatacccactggttagtgccgctactaattgtccgtagtttggagcgagtgcctgcaccaaaattcccggtggcttcggcaggtgtgtatccttcgattgcttggaggacctggattaaagccgtgttcatttcacgcccgtacaagccatcagtgggaatgatccctgtgtagttcttgtacccacggttaatcgcttgctgtgcctgacgaatagctgtcttgccgccgtaggcagagagtaaccggaactgtttcattgacagaagcgccatcattagttcaacatcgaccgttgcgctcgtatcgccaaggccaatatcgactttcatctggcgaatagagtcggccaagtggtcggtaaactcaagagtgatgccaccgtattcggctcgatatcccttgcaccacaaggctccttgaataatcccatgaacattgtcgtagccagaagtttgagtaatgccgtttggccaacgagacttgaatcgagactgtgttccagaaccgaaattgtttgccgtcgctgtaatacccagttcgatttgcagagcgcggatgagtgcgttgattgtatcccagccagtgttaccggtttcttggactgagccgaacccagttttattgccgtaagtcgaattcagccactgctgagttttcagcaccatttgatctgccatgattcctccttcagaaatcagttgttaactcgaggcaggcgaacacctgccacggaggggtccagaacaccggatgagaagctccgagttttttgccctcgcctgtacgtcaccgggaaacccgaatccggacggcaagagcgaaacttcgcgagtttcatccctcactggtactgccgacgaagcccgaagtgttaataccctgtttgattctgggactttgcgcgcagttggccccgcccgctgacctgtccgagcgtcgtagagatcgagaggccccaaccccctcgccagcgccgccaggttcccccgtgtctgccgatcagcaccgaggtgggcatctttgaggtttcgcaacctcggcgcgacgtggcgcgacgtggcgcagatttcagtaggtgtagatcctcggggtctgcctccaccggtcgccgtcgagcgccgactggcgggagtggcacggcttacacaaactgcggaggttggcctggtcatgggtgccgccgtgctccaacgggatgacgtggtggacttcctgcgccggggtgtaccggccagccgcgaggcagtcctcgcacaaggggtgggcggtgatgtaggcggtacgaatcttgcgccagcgggccccataacgtcggttgatcttcgggtcacgctgccacttgcggtagcgctcgtcctccgccttggcgtgggcttcgcagaagcgggcgtgggtgaggttcgggcagccgggctgggaacacggacgggcaggcttgaccggcatcacgcacccctttcccggacacggcaaagccccaaggcacccagccgatgaccgggcttgccctggggcttttcctacttttcaaccacctacatcattgcaggcccgaaaccctaaatgcatccgcagttcttgacaccttttggcggctaggttcacgcggcctgcccatacagcgccgacgccagccgggcgagcgcccgagacttcttctggtaggcgctggtgcgctccacgtagaagtggtcacacaccgtttgcaccgcctcatcctgggtaccgtcgccgaggaagaatgcttcgagcacgaacctgtcgtcgtcggtgagcagctgccaggcgggcaggaaccacgccatgtactcacgcgcctgggcgtaacgggcacggtagatgtcgatccgatccaacgtggccgccacccgcatctccccagcatgcagatccgtgtggcggggcatcccgtcgagtttcgatgaggctggggtggtgacgtcgtcgtaggcggtcttgatctgctcgtcggtggtgtcgatgatctgctccatcacggcgaagtcctgcaatgcgctgatggctgctttgcgggtgtcgaggtatttggtcatcacatgcatgacgactccttcctgcttatggttgtgagttcggtggcgaccgcgtcgatcaatgcggcctgggtcatgtccttcgcctccagcgccttgaggacggcttggtcgagggtgccggtggcggtgaggtgggtgatggtgacaggctcggcctgtccttgtcgatacagccgggcgttggtctgctgatacagctccaagctccaggtcagcgagaaccacacgagcaggtggccaccggactgcagattcagtccgtgcccagcggaagcggggtggatcaggccaagcgggatgtcgccccggttccacgcctcgatgtccgccgacgtcttcagttcgcgggcttgtgggaagcgacgctggatgcgttcgcggtcgtgtcggtaccagtaggcgacgaggacggtttggccgttggcggcctcgatgatgtcttcgagggcatcgagtttcgccccatgcacctcgaccgtatcgccgtgctcgtcgtagatcgcacccgaggcgagctgcagcagcttgcccgacagcgcggctgcgttcgccgcatccaccacctgcccatccagatcaaccaccaggtcggccttgagctgctcatacacagctcgttctccggctccgagcaccacgggcgtggtcgtcaccgtcagatcaggcagcgtgaggtggtcggtggtgcgcattgacaacgtcatgtcggcgatagcgtcgtagatttcctcctcagcgcctgccctcggcttgtacgtgaacacctgcatcccgttgcgcttatccggcaggaaccacttgtcgcggtagcgggtgatgaatctgccgaggcgttggccgccgtcgaggagccggaattgcgcccagatgtccatgagcccgttggaggcgggggtgccggtcaggccgacccagcgcttcacgtgtgggcgcattttcaccaacgccgtgaaccgcttcgcacggtggttcttgaagctggagagttcgtcgatgacgaccatgtcgaacggccagctatcgccgtactgtctgacgagccaggggatgttttcccggttgatgacggtcaccatcgccgacttggccagcgcgtcgagccggtcagctttggtgccgaccgcgaccgccaccgatagaccttggaggtggtcccacttggctacttctgctggccaggtgtcgcgggcgacccggagtggcgcgacgacgagcacccggctgacggtgaagtagtcgagcagcagctgccagattgccgtcagggtgatgacactcttgccgagtcccatgcccaggaggatcgccgcttcgtggtggtcgaggatgaaccgcgtggcggtctgctggtagttatgcggccggtagcgcatcaagcacctccttgatgccgtccaccgagtcaacgaccagcgcggtgaagccgtgggcggccagttggctcatccggcggcgttggatcggccgaggcttcttgccgggggctttcacttcgacgaagacgacctggcctcccatcaggcatagccggtcaggtacgcccgtggttccagggcagacaagcttccagcacaagccgccggatgcctcaacggccttcttgagctgggcttcaatgtggtgttcgttcatggtcactccttgagtggtttcccacgggggtgacgactggtgacgggtggatctggacttttctaaaggagatatttttgtggccttagtaatagttcaatactgatcgtcaccggtcgtcaccctcatcgggtttagctgttgaattcgctggtcagagccagtccgtagacgtacatgccatgcttggacttgcgtcgttcaaacccggattgttcgagagtggcgttgaagtcggccatcggccgagcccacccgctggtggattgcgcccacgctcggtactcctggtacaggtcaccggcgcgttcggatagggacgggtccacctcgcagcgggcgtcgaggaattgggcgaaccagttgttctcttcccgatatgcgcttgaggcagcgaccacttgggcgggtggggtgagctggtagtcctcggcgtggatgagccgcgagccttccatgatccatgcaagtaccgctccgccggcggtctcgtagaggtggtcggcgtagttcttcacatcggagctactctcgatgaccgcgttgaacgggatcacgatgagcctgcgccagatgcccgcatccatcgcgcccaccctgggcaggtgattcgtgtagaggatgagcgtgtgggatggggtgaacgcgaacggtgccttgtatttcttctccgcgtagatctggtcggtggaggcgagttgcttgaccgtggaggtggataggcgcacgccttcctcggactctgcggcgatgatgagccgtttgcctttcgcttcggcaagctcaggtttgacgttccggttcccgccaatggtgagcacgtcggcggacatgttgcccgcatacgtgccaagcactctcgcgatagtgttccagaacgtggacttgccgttgcggccgtccccgtaggcgatcacgagggcttcgaccatgaccgtcccgatcgctgccagcccgacgatccgctgcacatacccgatcagctcccggtcggattggaagaacacgttgagcgcccggttccagatttctgcgcccgtgtcggtggggtcgagcgcggtttgtttcgtgatcagatccagcgggttatggtcacgtcgggtgccgtcacgcacatcccacgtgccgccaggcgtgttgaggagatacgggtcagcgtccagccgggctggggtggtcagcaacatcgggtgtgcttccctcaggcaggaggtgatcgcccgggactcgcggcgtttcaacacgaacgcctcgtatgccttcgcgtcctcaaatgcccggtaggcggcccgctgcggtgaggtgaaaccgccgagtgctttcgctttcgacgatgcggctgcgagcaccgcgttcgcgcccgtcaccatgagctcgtcgcgggctttctccagcagatgcccggcctcggctagttgccggtcggtcagttcctgggcgatgccttgcgcagcaggcgcagactcagaccacacaccgccttcgtagacgagccagtccgtggcctccgtaaacgccagacgcgacgagtattctgcggtgagcatggatgcctgcccgacatcggtgaagtcctccggccgcaggctcgtcagctccgcgtaggcttccggcgacagataacccggctgcgcctcgactttggcggcgaaccggcaggcgctttgccagatcgactccaactcgtgatccgacaggggcggttcacacagggacgctttccggtcgaacaggtcacgagcttgggcggtctgcccgtaacggatcaggacgcgtccggcgaagcgggagagggtggcgttgcgggagccttccccgatcacctgcgtggaagcgtcgaacgcggcgaacacgtcgatctcgtcggcctcatccagccaggcgtcgagcagctttgtgccgttgtggatggtggtttcggggttggtggtgccgtagatgaaccgtccggcatccaacgcctgcgggtcgaagaacccgaaccgtccagcgaggcggcgcttcaaccccgcataggtgtcggcgtcggtgaccgggctgattgggaagtagacgtggaagcgaggcctggccgacagcgtccttttcggcttctggtggttacggctggtggcggtcatgaactcaacccccgccatcagctcggccaggtcatctggggtgatccactcgtcggggttgtcggtgtggtcgttgtcgatatccatcacgacacagtccgaggagatgaagctcgccgaggagcgccggtcgccggtgtaggtggcggcgacgtgatccaaccacgccacctgctccagcgaggtttggtcggtgatgtggtggtggttcgggtaatggttattgtgcgggttgccgctactcgtggcggcgcacaaggtgaacggagtcatgcgggatgcacctcctggaagtcggcgtcgaagaagcggatcgggatatccatctgatgggcccagtcgatctccgcccgcatccccgggctgaccctgccgatataggcccacagctgctcgcatttcgacagcaggatgcggttgaaaaacatcgccagctcccgggcatccgggtcggtgtcatccatgaactgcggataatgcaaatgcggagccaacgggatctgacgagcctttaccgcaaacgcacaaaaccggcgggcaagctccacgttggctgctatgtcacccgagtacggggagcagatgtagaccaatgggcggtagccgtattcggcgagctggatttctttcagcgcctggtagcaggtcgggtcggggtatccgtcggcgttgcgcagcggaatacccacatcgatggtggcggtcatcaggcgccctgaccttcacgttcgatcaccggcagcaggccacgggtgttcttcaacaggtcgtagatgaacaggcgacccttctgcgtccagtacatgtgggtgcgggtcttgccctcgtcgtactcgtgcgtcttggactgcgtgtagccctgctcggcaaatttcgcgtagaggaaccagcgtccggactggtggaactgcacctgctcctcgcgcagaatctggttaagcttcttcgccgacagcccgtagtccttggcgatctctgtggcggtgatcagtgagggcgatgccagcacgatgtcgtagtacgacaccttcggtgccgcctccaacaaagcttgctcggcggcgagccgcttggcacgttcagcccggagcgtggtgatcgcccgctccagaaactcgtcgtcagcgagcagttcgtcgatggcgtagataccatgtcggcggatcgtcggcagaacctcgtcgaacacccacgtctcgaacttctgggcggcaggaagtttggaagtgacgatcagccggtacaggtcgccttcgctgatgaacctgacctgctgaaccccacctgctgtttcaagggggtagtgattcacgactcccttgcagtgacgtgccagagcgtccttcgtgttggcgtagccgagggctgtagccacgtccttgccgcagaacaggatctgcccgctagaggtgatggttcggattgtgccgaactcgtggttggtgaacacttgtagtccggtagccatgaccagctcctattctgagagccaagtagacaatcggcggcgcggggtgcgccaggctctcacctgtcaggcacggcagacaccgaaaccggacacggcttgaggaaggctctcgcccatacgcccccgagcaccgacaaatccggacgggtcagagggcacactggtgtgtgaacgtaccgataactccgtgccccgtgctcttgcttcggcgtcatcaaccaggtagccttgtagtcaacatgaccggttccgctgcccgcctcggtgggagtccagggccggtcttcgtttttcgtatcaaacaggggtgcgcgtggagcaggtgaagcagttcaagacctacggtgaacaggtcgaattgcttcgtcagcgtgggatgcgagtgaatgatccccagcatgctgagacgctgctggcgcgattgaactactaccgcttgtccggatactggtacccgatgcgccgtttctcccaaggcgacggcactgcccgagatgaattcgttgagggagcatcgtttgacctggtggtagccctctatgggtttgacgaacaattgcgccacagcgtgttcatcgagcttgatcgcgtggagttggctattcgaaccaagctcggtcacgaactgggtcgccttgacccgctgatctatttggatcccaagcgtttgagcgcccgggcacggcagcgaaacaaagacgggcgtagcgtgcacgaggtgtggctgagaaagtaccagtcggcattgaaagcgtcgaaggaggacttcgtcgcccaccacaaatccaaatatggcgggactctacccatctgggcggctgtcgaaatcatggattgggggatgctgtcgtacctgtacggcatgtcgcccaatatcgtgcgcaaacggattgccgagccctgcggcctaactggtcctcagcttgaatcatggctgaaatccttgaatattctacgtaattacgcagctcatcatgcaaggatgttcaaccgtgtttacgacatcaaaccgaaactgaacaatggcgtcaggctggctccggtagctgaaggaatgaatcgcgtgttcgggcagctctcccttatccaatacttgcaccgccaactggacttgtctccagccgaccggctaccgaagctgttccacacctacccgcacaatcccatcgtgccgttttctcgcacaggagcacctgacaactggcgcgagttgcctctctggtgcgtctaatccttgcggtagtagtcgcattcgtacccgtcggcgtcgagtggcagtcctgctgcccagtcgggtggggtcgtcatgagctggcaggcatcggcgatggtgaagccggagtcctcgggttcgtcgatgacgatttcgtcgtggacgtgcatgacaatcttgtgcccagcctgagcgacgagtgtcatggcgtggacgaggaggtcacgagcgactgcttggacgatgttctcgacgagtttcccgccgtaggtctccagccgcccccacttgcgtccggtcgtgacaccgctgtaggtgatggaggtgccgccccaccggttctcaccaagctggggcttcacgtaggccagccgcctaccagagggcagggtgatgaacaagatgccggactcggcagtgaagcgaaggttgcgcagccgaacagcctggcgggtggtgatggcgtcaagtgcggcctgctcgacatccgcccagagtcgcacgatgttggggttggctgcccgccaggcgtcgacgatgggtttgagttcgtgctcggccagccccatccgtagggcacccatcgccttgagcgctccgacggagccgttgtaaccgcaggccagcgtggcgatcttccccttctggcgcagctcagcgttgatgccgtgtttttcgacggggacgccgaacatgcgcgacgcggtctcgcagtagaggtctttgccgtcgcggaaggctgccagggtggatgtttctccggcgagccaggcgatgacgcgagcttcaatcgcggagtagtcggcgacgatgaatcggcatccggcgctggggatgaacgctgtccggatcaactggctgagcgtgtctggcacggagtcgtagagcagttcaagggcgtcgaggttgcgttgtcgggtgagggtgcgggcttggtcgaggtcgggcaggtagttacggggcaggttttggacttggacgaggcgtccggcgaatcggccggtgcgtcccgctccatagaactggataaggccgcgtgccctaccgtccgtgcctgtgacgttatgcatcgcctggtacttcttcaccgagcttttcgcgaggtcgccgcgcagctccaggacttctttgaccttgcccgtggcggactcgagggcggcttcgacatcagccttcgccaaggacgacatctcgcagccgtgggtggtgagccattccttcaactggatcggtgagttcgggttctccaacccggtcaactcccgcgcccgcgccaacgtggcggcacgatgctggtcgtccagggcgacggcagcgtctgcgagggtgtggtcgagcaggatgccggtgtcgttgatgcgttgatccagggcgtaggcgtcccactcggcttcgggaatcggaaacgatgagagccggtcgtggatcgcgagttcgacctcgacgtcgcgctggttgtagtcgatgaactgagcccagctggtcgagtcgctgctgggcaggttacgggtgccgccaccgttgagcacgctgggtgtggctggcgtgcagaattgcttgatcagccgcttacccgccgtatccttctgaacgtcaaggtcaagagccgcaccgaccgcatccaagctcatcggcagaccgagttaagccgaccacaccatcgtgcagcgccactggctcgggtcaagaaacccggccgccaacagctcggggtgatgacgctgcagccacgcggagagcgcgacccgctcgaaggcggcgttatgcgcccacttgaccacgcccgggtccaccaatgctgcgagcacctcgtcgggcagcccaccaccactggcgagatcgacgacttccaccgggccgccgtcgatcgagtagccgaagatgaggaggcggaagtcggggtgttcggcatacgggtagacgccggttttcgctaggggtgctgggctgaaggtttcaatatcgatagcgatctggcgcatcagggctcctggacagtcgggtaggcgaaggtgagggagccaaccggtgtttggtggctccctcactgctggggtgctacttcgggtcgaggttgtaggtggcgttcatcctgtcgagctcggccttctccttggcgatcagctcatcgatgcgctgacgttcgcggcgtttggcccgcttgtccttaatccagtagtagccccagaccatccagaacgggatcaggacgtagacccacacggcgagggtgatggcgttgaaacagtcactcatgattcagcctccttagttgaggaagtcgtcggccggcgcgccgaagtcggactcagcggagacgcggcctgcgccaaggggttcaccgtcgcggatcttctgaatgttgcccagcccgcacgccacacccttgttcccgttcgtgttgaacgcgtagaacgacagggagacgcgggcgtagcaacccgagtacacctcggaacggtcaaggatcggagagacgttctcgtccacaacctgcggcggagtgaggctgttggcgttgacgaagaagctgtttgcgtaggcttcgtcgtcacgctcggtatccccgtcacgcagcggcagcttcagagccgccttgttggagcgcttgcctccgaacttggccgtaccagcgtcgatcgccgcgtcgatggccttctcgatagctgtgatggtggtggtgtcggccttcgggatgatcagcgacacggagtacttgggcttgccgccctggatggagttcggctcccacacgtgagcgtaggagaggcggacttcgccggtgacgacgcgggtggggttgttggttgacaaggttgttacctgctttctgttttcgtgaattcggtttgtgcgctgtggatttccagcgcgggtcgtttgtcggtgtcagacacgagcgtcggcttacccacgggcttgaccacgaggtcgccgagcacctcgttgaaggtcttcttgtccatgagccgttccatcgcagtgagcgtgatgagtctgcggtcgtagatgtcggcgtacccggcagcttcagccgcttcggcgacggcgttctcctccgtgtacttgcggacagaccgtccggcgacgagcttgaaaccatcccagtgcttgccctggttcaccgcctgcgagagcgcgtaggcctccacatccgcagcccacgttttgagctgtggaatccttgtcagcacgtccgcaatctcgctgccggacagctcggccggtggggcgaactcgtgctgggcgagcgcgaggttggcttcggcgcgtgctcggcacgtcggtgcgatgcggcagaactggcaccacgagccgggacagaactcgcccccgcccgccgcagccaactcggccttcggcttcacctcggtctcagcccatgcgaggaggtcggcgacgctggtttcccaagtgtcaacgttgccccgccggggctggtagatcgtcaccgcaacatcggtgatgtcatacaagtccccgaaagcgtggacggctccgagcgcgtacaacatgagctgcgggttgtgtgcggcctcgacgaggatgccctgcccgtacttgagatcgatgatctgcagcttgggttcggcgatgatcacgcagtcgccggtaccgaaaccgcccggcacgacgtgggagaagtcgaggcgctgctcgatcagcacctgcggatcaccacaggcctcccgtgccagtgagatgtgttcctggacgaaggcgacgtagtcgtcggtcaggtcctccatctcggtatcgatccagccggactcgggcttgaaagtcggcgcgtcgttcagggcacgccggagcttccactccgccagggcgtgtgcgacggtgccctgctcggccgccgccgacgtcgagtccggctcacgggattccagcaccgcgctgggtgggcagttcagccaccggtgcgcgcccgacgccgagagcagcgcatgctggtcaggcatcggacagctccttcgccttggccagcagccacccgtacttcgtcgggtcaaccgccgacagcttgtccgcgccggtggcgacgatcagctcacgcacctgctcggtcatgccttggctggagagcccggcgagcactccacgcacctgcgccagcgacaccggctccggctcaggtgccggttcgggtgcctgtcggtgggcggcctcgtactcagcggcggcctgctccaggtcgggttgtgcgagcccggcggcggcgatcggacgagcgccgggcatcccggcgtgatcctcgaacccctcccacgcggtctcctcaattgcggcggcgagcatggtgacacctgccgcgtcggccagcgccatcaggtcgtcgtcggtgtcggcgacacgcacctcgacggtggaggcttcggagccgggcaggagcacggccatgcggtgctggggtcggctggtgccgaagatcgcgcgcagcatccgcctgctggggcggatttcttttgcagcgagtgcggcagccgggctgggatgcttggcgatcttgatcttgagcttggtgggcatccgggtttccttccatgtgagtggtggtacgccccatcaccgggctggtgaagggagtgccttgcatctgtcaggcatgggacgcaccgaaaccggacggcctacgactcggtgagtgttttgcgcagttgggccagaccgcgcgagacggctttccgcaccgcatcggcactggtcggctggcctgcgccggtcttgtcggcggcgatctcggtgaaccggtcgccgtggagcacatgcagctcgatgtactcgcgctgcgtcgcagtcagcggactcagcagttcgaccaccgcgaggttggcctcgacctgctcggtgaagtccggatcgtccgaggcgaagtaatccgcgcccagcccgccacgctcgtcgtcatcaccgtggccgggttggtcgacggagatgtcggagcggcggcgattgtccagctcgcggtactcggcgtacacgtcgtcgaggtaggcgcgagcccacttcggacgcgaagccgggtcgcgcagctgggcacgcagttcttcgctgtcgggcaggtcagggacgggtaggtcgatggtgttgcccctgggggtcaggtacgggacagtgaattgtctgttgaatgccacgtgagggcttcccttcttgcgaagggagaccccgttgagggcaaccgacgagagaccgtggtgttgagcggaaacagtgacgggcaccaacccgacccgggggtgaacccgggtacaggtggtgcccgtcaagcgctcaacggaggtctcccgaatacggttgaaaaacgcatgcgggtgtaggaggaaggcggccggccggtgaccggtacggctttgaccgccacagcggttgggctgtcctgccggatgacgtctggccagcaggacagccgtgagggctacttgcccttacgcggcttggcctgagccagcgccgaggctgcgaccgacttcgtcttggccgaggtgcgaccgtcgcgcagcagtgcggacgccttcttggcgaccggtcgagacgtctgcttcgtgtttcgtgtatccatgtccctgttcacctcctgcctcagctcgctccgacacggttacgcgttcatgaagatgaacgcgacaagagtgaagcggccttgtaagatcgaaggaacacaggttcgctgttcgcccttgtggttctaggttccccgatgacggttttctgatcggctgggaagcgatgggcagcgatgggtcgcgatggagaggcggtgcggtggattacaagtcgagcttccacgccgtcttggcgacggtgcgcccgctgatgaaaggcacccgtaaccttggcgagttcaccgcaggtctcatcgacatgggactcgtgcctcgcggaaccgtctacggcgagaagaccgcgcttgagatgcgcaagtcggcgacgtggaaggggtacgccaacgggtctgaccagctgcctactgtgttagcgagcgagctggctgggcgatgggatcagtttcggttcgccagcaacgtctcccaggcatacgaggagtcggcactcaatgacctagccgaccggctccacgaccttgacgagtcgatcaacaagggcaatgtcaccgaaggtctaggccagctgttctacaaggtgttcaccgaagctgccggtgagaccgctgccgtaacggagcccttgactttggcagacaaggccgaccgatctggcatcccgtacattgacgagaagacgaatcgcctcaggcttggcgaccgctcggtcgcgttaccgccgaagcatcccacaccggacacagttcagcctgctgagctggggtatgtttcggcgctcctggccgcgcattgcgaagacaaagcccgtaccggcgttgaggtgcagctggacgacatcccgtcgcgtctggttcaacacttccaagaacagcgcaaagcgttctaccgtgccgaatgggtacgagaaacatcgtggaactgcatccacgatgggcggccattgtttgacgagttcttggaaacgatgcacgcgggagtctccgacaccaacttgcatcagtaccccaacggactcgaacgcctcctcgcgacactggctcaagcagccgcagtccaactcgacggtgtccggctcgaccagatcattgacctgatcgacgtgtggagccggaaaggttcctgccacgaactcgtcgcccggaaccggctgggatgggtagattgatgcgcgccacgtccctagacacaagtttcgaagctgaactgcgcgggctcatcttgctgttcctgctcggagatgcagcggatgccgactacctgggtgccctagacaccatcaccgtcaacgcccacaccttcggggtcggggcagagaacctcaacggcacccaccgactggccagcggggaactccacacgcgcacagtcctgatgacccaagctctccagcatttggcgatccaaggattcgtgacactacagccagatcgttctccggcggccttcacgattaccgctgagggtgaatcagtcgtcaaccatttccgctcccgatacgccggtcagttgttcgacaccgcgttggagacgatcgagcgggttggcgacctgagcacgagcgagctggctcagatcatcaggtcagcgaccccggaaggagaaacgcgatgacaccaggcttctggatcagcagcatcaccgtggccgggcaccccactcggcgggactccagcgtcggtttcgaatctggactcaacgtcatctacggaccgtctaactccggcaagtcctgggtgcttcagtgcatcgactacgtgttcgggctgaaagccgacgagttcgtcctcgacgaaaactccggctacaccgaggtgcgtatgggggtgcgcaccgcgcagggctcactcacgttatcgcgccccatcggtgagggagccaataacatcgaggtctccagcacagacccacgaattgagtctggaacctacaaacgtcaatcgtctggccgttccccgctactcagctcggtgtggctcaaactcatcggctacgacgcccctgaaaacctgaaaatcatcaagaatcaaaaccttgaaacccaggcgttgacgtggcgcaccttctggcatgcgctgtacgcggatgaagaccggatcagcaccaagaaaccaatccttctccctcttcagaccaccgcacagcccgcgttcaaatgcgccctagcgtcactgatcaccggcaaggactatgccgcctacgctcgtgatgagtctgtcgaaacgaggaaattgcgtaacaacgcgatcatcgactacctcgagccgctacccaaacagcttgaagaacgaatcgagttgatcgacaaagcactcggtagcagcgacccagcagagatccagcagcgcatcgatgagctgatcgcagaactggaacgtgtccagcaacgcatcacacacgccaccgtgcaggggcaagacgtcatcgcacgcctccaacaggtgcgtgactcgctggcggaatcccgcagtctgcggaaccgatacgaggaacttgccgcctcctaccgtgcccgcatcgagcggttcgatttcgtcgaggaaggccacgccctcaccgcacacagggaaccggcaacaacctgccccgtatgcacgcaggcactaccaccggaagcgcgatccgcagttccagagcccgatctgcgtgaacgccacgacctagctgcccgactcaacgatcttcgtcaaacgatccatcagatggatcttgaacaggcaccactgcaagaacaagagcaggatctcgccgcagaagccgagcgcatcgcccggcgcatcagcggcgagttagagccgcaactgcaagccctctcgacttcgcttgccagccacaacgcgatcatcgccatgcaggcagaaagagaacagcacctcgaacgcaaacaagccatcgaagacgaacttgaagaacgcaagaatcgcacattccccaagggcaacttcaatccgctcgacgaatacccgaaaacgttctggccgcagatgggcaccaacctgctcgacatccttggagcctgcgcgttccccagactcaaagatgcccgattctcgcgtgaactgttcgatgctgtcatcaacggcaaaaccaaagcggaggaagggcagggctaccggtcgttcgtcaacaccgctgtcatgctcgccctccgggaatacctcgcctccgaggacgccacacacaaccccggcctgctcatcatcgacaccccactactggggctcgacgatccacagctcgaccccgagcttcaagaagcccgtgaaaccatccccgctgccctctacgactacctcgccctcgaacaagacggcggtcagatgatcatcgctgacaacaccaagttcatgcccgacatagaaccactaaaggaccgatgcaaactcatcgtattcacgaaacgcgaaggagaaggacgctacggcttcctgctcgatgcccaggacgaagacctgatcgatctggaggaaacagatgacaactaaccgcgccttcagctacaagcccctctggaaactcctcatcgaccgcgacatgaacaaaatccaacttcaagaacgtgcaggcatcagtccagccaccctgtccaaactcggacgcggcggcaacgtcaccaccgacgtccttgcccgcatctgcgaagcactcgactgtgacatcgccgacatctgcgaggtcgtccccaccgacctgaagggagagaccgactagatgaccgctcaacgcctgcagctcacctggtacaacaaggacaaggctctcatccccactgagaccggcaagtacggctacacgtgggttgacccctctgatccgcgctactgcgaaacccacaccctcgtgctggacgactatgtgcaaggcagccagacaccgaagtctgacgagttcgcctactccgagcgcgctgacctggagccccaggatgacaacctgctgatcttgggtgaatcgggcgatgtcctcgaagccctcacccgcgtgcccgagcttgccgagaagtacgtcggcaaggtgaaactgatctacatcgatccgccgtttaacaccgcgcagacattcgcttcgtacgaggacaacctagagcactccatctggctgaccatgatgcgcgaccgactgcaccacatgaagaagctgcttgccgacgacggctccatctgggttcaccttgactacgcggagaaccaccgtatgcgactgctgctggatgaggtcttcggttgctcaaacttcattgccgagttcgtgtggcagaaagcagactcgccgcgaggtgacgctcaacgtgtttcggtggatcaagatgtgatcctttgctatgccgcgagtggaagcacagtcatgaatcgtatggaaaggactgccgcagataacgcccgcttcagtaatcctgacggcgactctaaaggtgtttggttcagtgataaccgctccgcgcccacaaacgttatgtcttggcagcaccctagcacctttgcaattcagcacccaatcagtggcgagatgatctacccggccaagggtggatgctggcgttttggtagagaacgtctccttgagtcattgaacgagtacgcggagtatgcaagcggtgatgtagacattgcggctcgggttgcaaacacatcgcttcggtcagatcaggttcgttcagacattcctgacctggtattggtcgaccccgcttcagcggctcaatgtgctcgcacaagaattgatgatggaaattggccagaattcttcgtgactgcaaccagcttcggcagaaagtcctatcctcctaatgaaggtcagcctgcccgttcatggtggcctaatgatcaggtgggacacaatcgcgaagctaagtcagaaataaaggctctcttttccggtgcgacgcctttctctacccccaagcctgaacgtctcctcgaacgcatcattcatatcgggtcgaacccgggcgacattgtgctggatgtgttcgctgggtcggggacgacggcagccgtcgcgcagaagatggggcggcgttgggtgacgtgcgaattgctggagtcgacgttcacaacgtttacgcgtccccgtctggagaaggtgctcaacgatcaagacccgggcgggatcactcggactaagggcgaacgagtcgacgctacggaagacgggctgcctgatggtgtctcgccggaggacgccgcgaaattcacgagcgtgctcaacaagctgatcaaggacgacccgaaattgaagaaaagcatcgaggtgaagacactgaaggctgcctcgaagaccagacgcacgaaggaagtagtgaactggcgtggtggcggcggcttccaggtcgcccatctgtcgcctgcgtgtttcgactacgcccctgaactggaccgggtgatgctaactgcggccgcgaccggacagactctgatcgagtcggtgactgccaacctcgggttcacactgttgcacccggatgatgactatatttttgatgcccgccgtggcaatgccttgttgaaggtggtggagggtgtggccacgaccgagatcgttgactggcttgcttcccaaatccagcccggcgagacaatcgtgctggccgccaccacggtgatggacggcgtgcgccagcatctgcgcaaactggtgaaggggtcgcgggtggtcgcattgcccgatgatgtgtttcggtacagcgaaggtggtgaccagtgatggcgaacaggctcaacatcagttttgactccgacatgctggagtcgatcagtgccgagttcgacctgcgtgctccgaacaaggaagcactgcgccagctggtcttcactctcgacggtgactatgacccgaccgtgatgcaggtgctcaacctcgctacgggcgtgggcaagacctacttgatggcggcgtttgtggagtatctgcgccgccaaggtgttggcaacgtggtgattgtgacgcctggtaagacggtgcaggccaagacggtgcagaacttcacgcctggttcgtcgcgctacattactggttcggcgcttccgccggaggtggtgactccgcaggattattcggcgtggatcgcgcgtcaaaacggcccggtgcaactcgcgttcgggcgagagactccgatgttggcattcattttcaatattcagcagttgattgcccctaagtctgatgagggtgacactttgggtggtacgcaggatgcgatgcggcgtaagcctcgccgtttcgatgagaacgccggggtgcttttcgattatttgaagggtcttgatgatctggtcgtgatcgctgacgagtcccacctgtacgggtcgagtgcggtggcgttcaatgcggctttaagagaactggatccggcggcggcgattgggcttactgcttcggtggataagaaaaccgatcacgtgatctatgagtatccgctgtatcgggcgatccaggacaaatacgtcaaagccccggtgttggctttccgtaagagtgggtatggcacggacgaggcctctgaggaacagcagttgcgggatgctttgcagctgcgggcgatcaaacaagcccactatgatgcttatgccgccagtgaaaaccgtgctcacgttaacgccgtggtgttcgtcgtgtgttcggacgtggaacacgctacccaagtagcggagcttttgcgtaccccggaatatctcgggcgtgacgaggcagtgttgcaggtggactccaaacatgaggacgagctgacgcagcgccgcttgaacgagctggacctgcccggctcgcccgtgttggcggtggtgagcgtgaacaagctcaaggaaggctgggatgtcaagaacatcgcggtcgtcgtgacgttgcgggcgatggcttctgaggtgctcactcagcagacgatggggcgcgggctgcggctgccgttcggccggtatacgggtgtgtggcagatcgaccagctcgacatcatcgcccaccaatccttcaccgagctgctcaacgccgagaacgtgctgcagcagttcggcctggacgaagccatcgccgagcccgacaaagccaaggtagaagaggcgatccgtaaagccgccgaagagtccggcacgggtacaggtacgcccacgaccggcggtgaccaaccaacgacgacaaccggttctgaaccgggcaccggtgtcagtggtgaggtcgccggtggtgtggctccgcagccgggcaccgttcccgtcggcggcagtgattccccgggtgcgggtttgcccggtatcggggttcgcaccatcaccgaacaggaggatcagcccacctgggagttggtttcgatcggacggaacccgagctttgctgacgtgtcctaccgattcccggtgacgacgatgactgtgcagcagccgcccattgacctgtcagaaatcagtgacgccgagattgagcaagcggcgcgtcgggtcacctctgctggggacgtgctgctgcgcaaagagatcatcgccgccctaggcaagaaactccgggcagaggatcgagaaagcgccgaagtcgactccgtccacgtcgacgacgacgacgccgaggaggcgctggtcaaactagtgatcaacatgtcgctggtgcccaaaaccgaacagaccgcccgctacgtcgccacgttcctggtgccgaagttcatgcgcaccgtgacgttcaccggctggaccgtcaaatccctcgactccgcccgcgccgaactcctagcgctgatcaagaactacacaaccgagacactgcgagccacccgcgaggtgccgaccatacaccccaagtcgatgccaggcaccggctacacgctcccgttgggtgagaaggtgcatgaccagatcgagagtcgtgaccagttcgtgcgaggccgggtctacggcggctggttcaagtcgctattcgccgaggagtccttcgactccttcaccggcgaataccagcttgctcgcctgctcaacacgtcgccggggatcgtgtggtggcatcgcctgcatccgcaagaccaggcattcgtgtactacaacgcgaaagaccgctacttccccgacttcgtagccttggacaccaacggggtgcattggatcatcgaaggcaaggacgagcgcggccgcgatgacgccagggtgcaggccaagcgtaaggctgccgaggcgttggtgcgccggttggtggctgaggatgcctacgccggtcagcactggggctatctgatcgcctacgagcaagacaccgcccgtgccgactcgtgggaagacctgaaagccttcgccagcccggtcagcaacgccctgtagctgcgagttcgcctgggcgcatcacggggctccagcgttgcgggaggtcgagggtgacggcctcgccggtgatgaacacgaatccgagcctgccatcggtgagcatgcagccgccctccagcatggcaaggaagtccgggatgtggagcgcaagctgggtcggcgattcggtcaggagcttgtcgatcgccgtgtggagcgtcgatgggcgtcgccgcgcacccgttgactgcaggctgtccacggcctggtcaaccgccgtgctgttgcgcccagcgagcacctgcaacgcctcggccatcttcaccagcagcacctcctggtagaggtggctggtggtgcaggtgccgcgcttgacgtagttcgtggggcactcccacacgtcgacccggttcggggtaccggagtgccaggtcttgtggccgaacggccgtccgcagtcgccgcagacgatcttgcgggacaggcgcttgccgaaggacttgtagccgcgtgggtcgacgcgggtgcccagccacggcaactcgcggtctgcaatgccgagagcctcggcggcgtggcgttgggcgtggaatgcgtccatccactcgacggtgtacccggcggcgagattttcgaggaggaagctggtcagccggtaggtcagtcgggcttgtactgttgcgagttcggggtattgcatggtgggggctcctgtctttgcgtcacgtacatacacgctctgatcagggctaatagcaagtcgtaaacggcgataccttttagcgcttgccgaactatttggcgctccgttgtcagcctcgacgcacgtggttcacgccgccccacagcgcctctcggacaagccagccaccggagccgatccgtccgaatatgcggctcgacggtcaacactaaggcgcgttttacctagtggggagcgggtttcgccccatctgcgtcatccgcgcaccacaaacccctgtatccacttcgatacagtctgc

SEQ ID NO: 69 - DNA, 27846 bp, Propionibacterium acnes
  source 1..27846: mol_type = genomic DNA
ggtggtgccgaagaagaaggaatggccccaccaatctgctggtcggtagaagtacggggtttgagccagtcgagtagtttcataatctgctccttgcaaggtattgtgaaggatatgaaatctcttacccctcatttgcttctctgctcttttttcacaagcattgctcctgccttaggagaaggatttcgcaacaaacgtgtggctttcattccgacagcagcagcccacgaggagtacacagcctacgtggattcagcacgctcatcatggaaagaacttggcagcaatatcaccgatgtggatattgccagaatgcctctaagaacagcgaccgaggcgcttgagcaagccgagataatctatctttcaggagggaactccttctacctcctcgattgcctacgctcaacagaaatcgaccagattattcgagggcgtctggccgaaggggcgattctagttggtgaatcagctggagctatagtttgtagcccaaatatcgcctacattcagccaatggatcgtgtccctgacaactacagccaggctgactacaccggactgaacttagtggacttcttcccggtacctcactacctcgcccctccatttgtgaagagttccaaggaagtagtcgcccagcacgctagcctcccactcgagctcatgaacaacgcagaagcggtaatagtagagggtccccaaaggacaaagatctcatcagagcaccagtagtcctcgtgagtcgtacaccgacgtgcccgtgtggctgccaccgcctcggatagcgcggtcgagggccatgatggtggcgaccacctcgtcgatcttctcggtggacttttgcttgtcgggtttgatgtttcctgccgggtcggtgcggacgtgaatgttgtcgaccatccaggacagcactgggtgcctgccgtgagcgagcctaccttctagtgcgagtctcatgagctccttggacggtgggctcatgtctttgaagccttgcccgaagggcacgacggtgaacccggcatcgtcaaggttttggctcatctggactgcgccccacctgtcgaaggcgatctcgcggatatcgaagcgtgtcccgagttgctcgatgtggcgttcgacgtgggcgtattggacgacgttgccctccgtggtctctaataagccctgttggtgccacaggtcgtagggcacatgataacgcgccacccgcaacgccaggttgtcctccggtatccagaaccacggggcgatccggtacttcttcgtccccgtagggtgggaagatgaggacgaaggcggtaatatccgtcgtagaggcaagatccagcccgccgtagcagcgtcttccttccagctcgtccaggtttaccgggtcggctcccgcgtcccagatgtgcatgggcatccaccgcaccgactgcttgacccactggttcaacctgagctgccggaacgtgttctcctcggcagggttctgccgggccgagttgcacgccgcgcgcaccttgtcgatcggcaccgtcacgcccagtgaggggttggctttgcgccacacggcctcatcggtccaatcatcatccgcgtcggccccgtagatcaccggatagaacgtcggatcatacttcttgcccgcgaggatgtcctggactttctggtgctgctcatagcaaatcgaatgcgtatcagttccggcggtggtgatcaggaaatacagcggctaggtgcgtgcgtcgcccgaacccttggtcatgacgtcgaacagggctcggttgggttgggtgtgaagctcgtcgaagaccacgccggagatgtcgaacccgtgcttgaagtaggcctctgcggagaggacttggtagaaggagttggtgggcttgtagatgattcgcttctgcgaagagaggatcttcacccgcttcgacagggctggtgattggcgcaccatatcggcggcgacttcgaacacgatcgaggcctgccgccggtcggccgcacacccgtagacttcggcacgctcctcaccatccccacacgtcagcagcagggcgacggcggcggcaagctctgatttgccctgcttcttggggatctcgacataggcggtagtgaactggcggtagccgtcggctttgacggtgccgaacaggtcacggatgatttgttcctgccagtcgatgagctggaagggctgtcctgaccagcggcccttggtgtgtttcaaggcttggatgaacgcgaccgcgaagtcggctttccgcttgtcataggtggagcctgcggccatgaaccgggtcggcgtgtaggtgtcgagagtgcgcatcacgcccgtcaggctccttcctgtgctggttagttggtgtgggcgaaggcccaggcgatggcgtggccggcgtcagcgaacagttcgtcagcctcggcgaccaggtcgagttcgcattcactgaagcctcgggcgtccggtccccagccggagatcggctgctcggcgagcttgtagacgcgggcgtcgtttccgatccggcctttgcccaagtgccggtaggccgaggcgaggacgaagtccccgtaggcgatcaccgtgccgtagctgtcggtcgccatctgcagctgctccatcgtggtcttttcgttgttcatgaccttctccttcttgccttgttcggtcatgtacatacagccataggtgcgcgctcttatccagtcgtaaaagccctagtcagcccactatttttgaggaatctttgaggggcgacgggcacggaaacggcccctgattgggtgggtacccacggtggcttggggtcagtcgatggccaggtgccaggcggggatcatgcggcgttccccggtgatcgggtctgggtagcggtcgttgacttgggtcatgcctcgcagggttgcccctgcctgggtgaggttccagatgatcgtggtcaggccggtctggttcgcgctgatcgtgaactcgccgatgctgtgctccttgagttcgtcgaggatgctgggcacgtctgagtcgtagagaccttcggcgaagtcgagcagctcgttgcccgcccgctggctgttcatgtagacggtgagcaggctcgtggacgaggtttgggtgcgggtcgcgatcttgctggtcgaggtcgtcaattgtgttcatcgcgggtgtccttgtgggtgggtggggtgcgccaggcggcgttgccgtccaagtgtttgagcaaggtgcggcggacgggtttggtgtcgtcgccgatcagaccgaggcgcagcagccagcagcgcatcgcatatttgtcgttcccgcccgtttcggcaggtttggctgaggctcttgtggcggttttggcgtggtcgatgatccgggcgatcagcaccgtggtggcctccactacctgcgggtcgggcgctacgtcgaaccaggggaactcgaccgtcccggcctcggcgtcgatgctcatcggggttgcggggatctggagtgctttggcgatgagctctcctttcgctgctagcgtcgcctccaccttccctttcgtggtgtcctcccaaccggtggtggggaacgccaacgtcaaccccaactcgcctggctcgtcggtggtgtccgtcgggaatccggcctgcgcggccgcctcgaccagcccggccacgtcggtgtcgtcgggcagatgcagcagccagtcacgatccaacatggcctcgccaatctggtaggcaaacgttggggttcccagatactcgacggtcgctcgcagctgggtggcgagaaaagcggcgagttgcttgcggcctttgcgctgcttggtgaacttgagtgtcgtcatgaccggcctcctttgcgtgttcccctggtcggagtggttttcggtcatgtacatacacgctctatcccgaccagatagcaagtccggacggccacctatttcttgcctcgatccacggccttcaccacatccaggtaggccaactgttggccgtcgcgcaggcaggtgatacctgcggcgtccccggtggcgtcggcgtagcggcgcagaatgactgaggcgtatttctcgtcgagctccatgcagtaagcgatccggttggtggcctcacacgccatgagcgtggagccagagccggcgaacgtgtcgagcacgatcgcattcgcctgggtggagtttccaatcggatacgccaacagatccagcggcttcgaggtcggatgatcagcattcctgcgaggcttatcaaaccgccagacggtggtttgtttccgatccgcgtaccacgtgtgcttgcccgtcttcacccagccgtagagaacgggctcgtgttgccactgatacggggaacgacccagcaccagggagtccttgacccagatgcaacaccccgacagcttgaagcccgcgtcttgaaaggcgcgccggaagttcagaccttcggtatcggcgtggaacacgtacgcggacgcgcccttctcacacacgcccgccatctgagtgaacgctgcgagcaggaactcgtagaacgcgtccgcgctcatcttgtcgttcttgatcgacaagccgtcagacgattcgaaggcgacgttgtatggcgggtccgtgagcaccaagttggccttcttgccatccatcaacagctcgatgtcgcccgcgttggtggcgtcgccgcacaccagccgatgcctacccaccgtccagatatcaccccgctcgacgaacgcggcagcctccagggcggcggtcagatcgaagtcgtcatcctccacctcgtcctcatccaaggagccgatgagctgggcaatctcatcgtcgtcgaacccagtcagctcagcgtcgaaatcactcgcgtccaggtcggcgatgagcagggcgagcttgtcctggtcccagtcgccactgatcttgttgagcgcgacgttcaaggctttttcgcgggtctcgtccaactcgacgaccacgcagtcgacagtggtttcaccgaggtcttcgaggactttgaggcgctggtggccgccgacgacatggccggtggtcttgttccagatgacaggttcgacgtatccgaactccgtcagcgaccgcttgagcttttcgtagtcggggtcgccgggccggaggtctttgcgcgggttgtagtcggctggcgtgaggtcagcgatgggtagctgctcgatgcgcacggggctccaccgccttccgcaggtcgcgctcaaaacgccaggtttgttcccagcgcggccaatcccggcccatgtgcccgtagaccgcgagatcccggtaacggggtgtgcgcaggttgaggacgtcgatgatccccgccggccgcagcacgaacacgtcacgtgcggcggcggtcaagatgtggtcggcgtactcgccggtgccgagcgtgtccacctcgaacgcgaccggatcagccttcccaatcgcatacgagatgcccacctcgcactcagcggccagcccggcgtcaacgatcgtacgagcgatcaggcgagccatgtaggccgctgaccggtcgaccttggatgggtccttgccggagaacgcgcccccaccatgagacccgagcccgccgtaggtgtcgaccatgagcttccggcccgtcagcccggtatcggctcgcggcccgccctcaacgaaccgacccgacggattcacaagaatttcggtgtgctcgtctatgggtaggtaggtctggcaggccggggccacaatcagcgagcgcacctcacgctccaacacggccagatccttgcccgcctcatgctgcaccgagaccacgacggtctcgacggcggcgggggtaccggtgtcgtcataacgcacactcacctgggccttgccgtccgacttgatcccgcagatcgtcccctcgacctgggcagtatcgagacgctcgcagatgcgatgtgccaggacgagcgggagcgggaggcgttcaggggtctcggcggtggcgtaaccgtagaccgtgccctgatcgccagccccctgcaacgcgaacgccgaactatcaccaccgcgtgcctccagcgaggtggtgaccccggcgttgatgtcgctcgattggcggcgcgtccacacgtagatcaggatcccgagcggactgtatccggcacgcgcgagggcggtgcgcacagactcccggatacgcgggcggtggttggtggtgatttcgccggtgacgatgatccgccgaccggctgccatcacctccaccgccacccgtgcggccttgtcgtcgtagaggatgtcgtcgaggatctggtcggcgatctgatcggccaacttgtccggatgaccagcacacacagactcggcagtacgaatcgaacacataagcacactcgcttccacgaatcggaggggaacaagaaagcgtccaccccactagagggtggacgcgaagatcatgaggggcggttaggagcgggcgttgagcagctgctccatcacctcgtcgccgggcgtggtgcccgcgtagtcggtggtgcaggtggcgcgcacgatctcgtaaatctcgtaccaatacacattcgcctgcttcccgaaactctgggacatggcgacaaacgggctggcgatggcggcaccggtggtggggtgcttgccgagcaggccgaacttggagatcgcctgctcgcactgcacataccgggcaaacgcctgcgcatacgcctcaatcaggcgaggcgccacgaattgggaaccgccacgttgatcgagccactgccacgtctcccgatagacgaggtcagcgccaagcggtttgccgtcacgctgaatctccgacagatagtccgatggttcgggcatcgtctccccggcaagcaccgcaccgtcgccaatgtcattacctgcgaagtcgaagggttcgttgagcgggtcttccaggcgggtggcggggcgtccggcggcgagtttctcgcccagcgggccgggcttcgcgcctgcacgcacgcggcgtcggcccctgttggtgccgtctttggccatgggtcgcctccccgccgtagaatcgtcatggtttcggtgctgaagtccacgggaggtgtgagtggttgagtctttaaaactattcgttcggacctacgtgtattgggtagggctcatccttggcttcgcgatagtgcccggttctctgctcttcactgctgaagtcgccccggtgaacactccattgtggcttgcacctttcgccgggctgctgctttttgtcattgatcggccatcaacatgggagccgccgctctggcgagcattactgatccgagtattgggtgcaggatttgcagccaccatgctcatcgcgtttgatgcagttgcttccacccactatggatctcaacactggagtgagacgctcctatctttcggtctcggttggattgtcttcacggtagtggcaggacacatgctcatgagcagctccgcccgatttggcacacctgctcacacgatcagggacgcgatccgtacctacacgacatggataggaatctgcttcgggattttctatatccccgccgcgggactctccgcagctggcactcttttgatggttcttccgctttatggaacgttcctcgccggcctggttcttttgatagttgacccgccacgacgatggccgcaaccgcgagtgaaggcactgtggatacgactcttgtcaagcgtggcagcagcattactacttgttgtcacgaactcgttctatcgcagtactcgcacacacgagattttcgtcggggactggcaggaaaacctggtcttcttcgtgggtgcttgggcactttatgccgcagtggctggggccaggtatcttacgcctggccccagccacgaagcagatgacaaactcagtagatgaattcagctagagcttgacatgctgccctcttggtttcttcgctaggctcaacgcccgagtagccgtatgccccattggaaccgtctgtgagaaggccaacgtatctgtcatccaatgggccatcaatttctgcaaagaacttgtcctttgcggttcctccgtcgcttgcaccaacactctcagagatcgccttgaatcgctgcaatagcgaaactggattgttgtagtagctcctcagcgttcgggacagaaggttggggtcgtcggctcccgagcctttcagcatcgcagccagtttgatcgcatccccgtcgctacacaggtcggagtagttgcagttgttcggcagatcattggggatggtcaaaccttgaagtccgctgtgattcttatagttatccccttggccaacaagagcccttgctattgcaataatgtttgagccgggattcaggtcaacaaccttttgaatcggaccgagcgctgaagctaagtcacccgcccatcccgtccacttatcaggaacgagcgggttgaggttgatgtagcccagggtggtcacgctcatatgcgggatatctactgcaccacctgcggggtccgtccattcttgtcgatcggagcgaatccacttattcaaggcagagattatctgagacgcttgagtgtcatcttccagccttttcgcgtccgcctcccgatatgcttcagctgccgcggaccactttgcgcttcccttgaggtagaccgttgataggtagttgaggacacatcgccaagtcggaactttgacccaagtaacgtagctgccggatgtgatcggatcctctccgaaagcgtagtccttatagaccacgcgcaattcctcgaaccggctctcaagcgcttcgatcagatcgagaaaatctagagcgtcgtaattcactggctgcgcgtggcgcaccgacgaatcggctgacatgcgacccgaatatgccacgcggtcaagatcccatttcccccgatatccactgatttcgtggaactgatcaaatacccagttgtcggggatggggaaaccgagattacctgagaatccggtagacatgtcagaaacgaatgatgctaccgcgtatccagcctgagctatccgggtgcagatgtttcgcgaggcgtagatacccactcggtagccgccgccgaggctttgcgttactgccttgaagtagggcaggatgtggctggtcacctgaggatccgtggcatcgtagtcaacggcgaagtagatcactgtaggtggaacaccaagtcgttgggcagcggtttgggcctctttcgcatgacggtgcccattttcgacactaaagtacttaagttcagttgagtactcttgaaaaattgggaaatacttcagcccatgaccaacgattcgctctagctcgcctgtgcggagcgccttgaaatagtctgcctcagacttactgctttggttgggttcactgagatagcggcctacgatctgataaccatcagccttaagatgtccagcaagctcgtcagtgatctcaaagcgcgtatcgcaagccacacatggccgattggggtcgcctttagaagtgagcaggctcatccatgtggttgggtcgaccaccccggtcactggcaaggcgtgtgcttgctggaactgccacagcgtgttgctgatttcgctgttccacgtgctggtcggcaaaatggagtagccgttgcagaccagactcacagtggctagccatacccactggttagtgccgctactaattgtccgtagtttggagcgagtgcctgcaccaaaattcccggtggcttcggcagttgtgtatccttcgattgcttggaggacctggattaaagccgtgttcatttcacgcccgtacaagccatcagtgggaatgatccctgtgtagttcttgtacccacggttaatcgcttgctgtgcctgacgaatagctgtcttgccgccgtaggcagagagtaaccggaactgtttcattgacagaagcgccatcattagttcaacatcgaccgttgcgctcgtatcgccaaggccaatatcgactttcatctggcgaatagagtcggccacgtggtcggtaaactcaagagtgatgccaccgtattcggctcgatatcccttgcaccacaaggctccttgaataatcccatgaacattgtcgtagccagaagtttgagtaatgccgtttggccaacgagacttgaatcgagactgtgttccagaaccgaaattgtttgccgtcgctgtaatacccagttcgatttgcagagcgcggatgagtgcgttgattgtatcccagccagtgttaccggtttcttggactgagccgaacccagttttattgccgtaagtcgaattcagccactgctgagttttcagcaccatttgatctgccatgattcctccttcagaaatcagttgttaactcgaggcaggcgaacacctgccacggaggggtccagaacaccggatgagaagctccgagttttttgccctcgcctgtacgtcaccgggaaacccgaatccggacggcaagagcgaaacttcgcgagtttcatccctcactggtactgccgacgaagcccgaagtgttaataccctgtttgattctgggactttgcgcgcggttggccccgcccgctgacctgtccgagcgtcgtagagatcgagaggccccaaccccctcgccagcgccgccaggttcccccgtgtctgccgatcagcaccgaggtgggcatctttgaggtttcgcaacctcggcgcgacgtggcgcgacgtggcgcagatttcagtaggtgtagatcctcggggtctgcctccaccggtcgccgtcgagcgccgactggcgggagtggcacggcttacacaaactgcggaggttggcctggtcatgggtgccgccgtgctccaacgggatgacgtggtggacttcctgcgccggggtgtaccggccagccgcgaggcagtcctcgcacaaggggtgggcggtgatgtaggcggtacgaatcttgcgccagcgggccccataacgtcggttgatcttcgggtcacgctgccacttgcggtagcgctcgtcctccgccttggcgtgggcttcgcagaagcgggcgtgggtgaggttcgggcagccgggctgggaacacggacgggcaggcttgaccggcatcacgcacccctttcccggacacggcaaagccccaaggcacccagccgatgaccgggcttgccctggggcttttcctacttttcaaccacctacatcattgcaggcccgaaaccctaaatgcatccgcagttcttgacaccttttggcggctaggttcacgcggcctgcccatacagcgccgacgccagccgggcgagcgcccgagacttcttctggtaggcgctggtgcgctccacgtagaagtggtcacacaccgtttgcaccgcctcatcctgggtaccgtcgccgaggaagaatgcttcgagcacgaacctgtcgtcgtcggtgagcagctgccaggcgggcaggaaccacgccatgtactcacgcgcctgggcgtaacgggcacggtagatgtcgatccgatccaacgtggccgccacccgcatctccccagcatgcagatccgtgtggcggggcatcccgtcgagtttcgatgaggctggggtggtgacgtcgtcgtaggcggtcttgatctgctcgtcggtggtgtcgatgatctgctccatcacggcgaagtcctgcaatgcgctgatggctgctttgcgggtgtcgaggtatttggtcatcacatgcatgacgactccttcctgcttatggttgtgagttcggtggcgaccgcgtcgatcaatgcggcctgggtcatgtccttcgcctccagcgccttgaggacggcttggtcgagggtgccggtggcggtgaggtgggtgatggtgacaggctcggcctgtccttgtcgatacagccgggcgttggtctgctgatacagctccaagctccaggtcagcgagaaccacacgagcaggtggccaccggactgcagattcagtccgtgcccagcggaagcggggtggatcaggccaagcgggatgtcgccccggttccacgcctcgatgtccgccgacgtcttcagttcgcgggcttgtgggaagcgacgctggatgcgttcgcggtcgtgtcggtaccagtaggcgacgaggacggtttggccgttggcggcctcgatgatgtcttcgagggcatcgagtttcgccccatgcacctcgaccgtatcgccgtgctcgtcgtagatcgcacccgaggcgagctgcagcagcttgcccgacagcgcggctgcgttcgccgcatccaccacctgcccatccagatcaaccaccaggtcggccttgagctgctcatacacagctcgttctccggctccgagcaccacgggcgtggtcgtcaccgtcagatcaggcagcgtgaggtggtcggtggtgcgcattgacaacgtcatgtcggcgatagcgtcgtagatttcctcctcagcgcctgccctcggcttgtacgtgaacacctgcatcccgttgcgcttatccggcaggaaccacttgtcgcggtagcgggtgatgaatctgccgaggcgttggccgccgtcgaggagccggaattgcgcccagatgtccatgagcccgttggaggcgggggtgccggtcaggccgacccagcgcttcacgtgtgggcgcattttcaccaacgccgtgaaccgcttcgcacggtggttcttgaagctggagagttcgtcgatgacgaccatgtcgaacggccagctatcgccgtactgtctgacgagccaggggatgttttcccggttgatgacggtcaccatcgccgacttggccagcgcgtcgagccggtcagctttggtgccgaccgcgaccgccaccgatagaccttggaggtggtcccacttggctacttgtgctggccaggtgtcgcgggcgacccggagtggcgcgacgacgagcacccggctgacggtgaagtagtcgagcagcagctgccagattgccgtcagggtgatgacactcttgccgagtcccatgcccaggaggatcgccgcttcgtggtggtcgaggatgaaccgcgtggcggtctgctggtagttatgcggccggtagcgcatcaagcacctccttgatgccgtccaccgagtcaacgaccagcgcggtgaagccgtgggcggccagttggctcatccggcggcgttggatcggccgaggcttcttgccgggggctttcacttcgacgaagacgacctggcctcccatcaggcatagccggtcaggtacgcccgtggttccagggcagacaagcttccagcacaagccgccggatgcctcaacggccttcttgagctgggcttcaatgtggtgttcgttcatggtcactccttgagtggtttcccacgggggtgacgactggtgacgggtggatctggacttttctaaaggagatatttttgtggccttagtaatagttcaatactgatcgtcaccggtcgtcaccctcatcgggtttagctgttgaattcgctggtcagagccagtccgtagacgtacatgccatgcttggacttgcgtcgttcaaacccggattgttcgagagtggcgttgaagtcggccatcggccgagcccacccgctggtggattgcgcccacgctcggtactcctggtacaggtcaccggcgcgttcggatagggacgggtccacctcgcagcgggcgtcgaggaattgggcgaaccagttgttctcttcccgatatgcgcttgaggcagcgaccacttgggcgggtggggcgagctggtagtcctcggcgtggatgagccgcgagccttccatgatccatgcaagtaccgctccgccggcggtctcgtagaggtggtcggcgtagttcttcacatcggagctactctcgatgaccgcgttgaacgggatcacgatgagcctgcgccagatgcccgcatccatcgcgcccaccctgggcaggtgattcgtgtagaggatgagcgtgtgggatggggtgaacgcgaacggtgccttgtatttcttctccgcgtagatctggtcggtgaaggcgagttgcttgaccgtggaggtggataggcgcacgccttcctcggactctgcggcgatgatgagctgtttgcctttcgcttcggcaagctcaggtttgacgttccggttcccgccaatggtgagcacgtcggcggacatgttgcccgcatacgtgccaagcactctcgcgatagtgttccagaacgtggacttgccgttgcggccgtccccgtaggcgatcacgagggcttcgaccatgaccgtcccgatcgctgccagcccgacgatccgctgcacatacccgatcagctcccggtcggattggaagaacacgttgagcgcccggttccagatttctgcgcccgtgtcggtggggtcgagcgcggtttgtttcgtgatcagatccagcgggttatggtcacgtcgggtgccgtcacgcacatcccacgtgccgccaggcgtgttgaggagatacgggtcagcgtccagccgggctggggtggtcagcaacatcgggtgtgcttccctcaggcaggaggtgatcgcccgggactcgcggcgtttcaacacgaacgcctcgtatgccttcgcgtcctcaaatgcccggtaggcggcccgctgcggtgaggtgaaaccgccgagtgctttcgctttcgacgatgcggctgcgagcaccgcgttcgcgcccgtcaccatgagctcgtcgcgggctttctccagcagatgcccggcctcggctagttgccggtcggtcagttcctgggcgatgccttgcgcagcaggcgcagactcagaccacacaccgccttcgtagacgagccagtccgtggcctccgtaaacgccagacgcgacgagtattctgcggtgagcatggatgcctgcccgacatcggtgaagtcctccggccgcaggctcgtcagctccgcgtaggcttccggcgacagataacccggctgcgcctcgactttggcggcgaaccggcaggcgctttgccagatcgactccaactcgtgatccgacaggggcggttcacacagggacgctttccggtcgaacaggtcacgagcttgggcggtctgcccgtaacggatcaggacgcgtccggcgaagcgggagagggtggcgttgcgggagccttccccgatcacctgcgtggaagcgtcgaacgcggcgaacacgtcgatctcgtcggcctcatccagccaggcgtcgagcagctttgtgccgttgtggatggtggtttcggggttggtggtgccgtagatgaaccgtccggcatccaacgcctgcgggtcgaagaacccgaaccgtccagcgaggcggcgcttcaaccccgcataggtgtcggcgtcggtgaccgggctgattgggaagtagacgtggaagcgaggcctggccgacagcgtccttttcggcttctggtggttacggctggtggcggtcatgaactcaacccccgccatcagctcggccaggtcatctggggtgatccactcgtcggggttgtcggtgtggtcgttgtcgatatccatcacgacacagtccgaggagatgaagctcgccgaggagcgccggtcgccggtgtaggtggcggcgacgtgatccaaccacgccacctgctccagcgaggtttggtcggtgatgtggtggtggttcgggtaatggttattgtgcgggttgccgctactcgtggcggcgcacaaggtgaacggagtcatgcgggatgcacctcctggaagtcggcgtcgaagaagcggatcgggatatccatctgatgggcccagtcgatctccgcccgcatccccgggctgaccctgccgatataggcccacagctgctcgcatttcgacagcaggatgcggttgaaaaacatcgccagctcccgggcatccgggtcggtgtcatccatgaactgcggataatgcaaatgcggagccaacgggatctgacgagcctttaccgcaaacgcacaaaaccggcgggcaagctccacgttggctgctatgtcacccgagtacggggagcagatgtagaccaatgggcggtagccgtattcggcgagctggatttctttcagcgcctggtagcaggtcgggtcggggtatccgtcggcgttgcgcagcggaatacccacatcgatggtggcggtcatcaggcgccctgaccttcacgttcgatcaccggcagcaggccacgggtgttcttcaacaggtcgtagatgaacaggcgacccttctgcgtccagtacatgtgggtgcgggtcttgccctcgtcgtactcgtgcgtcttggactgcgtgtagccctgctcggcaaatttcgcgtagaggaaccagcgtccggactggtggaactgcacctgctcctcgcgcagaatctggttaagcttcttcgccgacagcccgtagtccttggcgatctctgtggcggtgatcagtgagggcgatgccagcacgatgtcgtagtacgacaccttcggtgccgcctccaacaaagcttgctcggcggcgagccgcttggcacgttcagcccggagcgtggtgatcgcccgctccagaaactcgtcgtcagcgagcagttcgtcgatggcgtagataccatgtcggcggatcgtcggcagaacctcgtcgaacacccacgtctcgaacttctgggcggcaggaagtttggaagtgacgatcagccggtacaggtcgccttcgctgatgaacctgacctgctgaaccccacctgctgtttcaagggggtagtgattcacgactcccttgcagtgacgtgccagagcgtccttcgtgttggcgtagccgagggctgtagccacgtccttgccgcagaacaggatctgcccgctagaggtgatggttcggattgtgccgaactcgtggttggtgaacacttgtagtccggtagccatgaccagctcctattctgagagccaagtagacaatcggcggcgcggggtgcgccaggctctcacctgtcaggcacggcagacaccgaaaccggacacggcttgaggaaggctctcgcccatacgcccccgagcaccgacaaatccggacgggtcagagggcacactggtgtgtgaacgtaccgataactccgtgccccgtgctcttgcttcggcgtcatcaaccaggtagccttgtagtcaacatgaccggttccgctgcccgcctcggtgggagtccagggccggtcttcgtttttcgtatcaaacaggggtgcgcgtggagcaggtgaagcagttcaagacctacggtgaacaggtcgaattgcttcgtcagcgtgggatgcgagtgaatgatccccagcatgctgagacgctgctggcgcgattgaactactaccgcttgtccggatactggtacccgatgcgccgtttctcccaaggcgacggcactgcccgagatgaattcgttgagggagcatcgtttgacctggtggtagccctctatgggtttgacgaacaattgcgccacagcgtgttcatcgagcttgatcgcgtggagttggctattcgaaccaagctcggtcacgaactgggtcgccttgacccgctgatctatttggatcccaagcgtttgagcgcccgggcacggcagcgaaacaaagacgggcgtagcgtgcacgaggtgtggctgagaaagtaccagtcggcattgaaagcgtcgaaggaggacttcgtcgcccaccacaaatccaaatatggcgggactctacccatctgggcggctgtcgaaatcatggattgggggatgctgtcgtacctgtacggcatgtcgcccaatatcgtgcgcaaacggattgccgagccctgcggcctaactggtcctcagcttgaatcatggctgaaatccttgaatattctacgtaattacgcagctcatcatgcaaggatgttcaaccgtgtttacgacatcaaaccgaaactgaacaatggcgtcaggctggctccggtagctgaaggaatgaatcgcgtgttcgggcagctctcccttatccaatacttgcaccgccaactggacttgtctccagccgaccggctaccgaagctgttccacacctacccgcacaatcccatcgtgccgttttctcgcacaggagcacctgacaactggcgcgagttgcctctctggtgcgtctaatccttgcggtagtagtcgcattcgtacccgtcggcgtcgagtggcagtcctgctgcccagtcgggtggggtcgtcatgagctggcaggcatcggcgatggtgaagccggagtcctcgggttcgtcgatgacgatttcgtcgtggacgtgcatgacaatcttgtgcccagcctgagcgacgagtgtcatggcgtggacgaggaggtcacgagcgactgcttggacgatgttctcgacgagtttcccgccgtaggtctccagccgcccccacttgcgtccggtcgtgacaccgctgtaggtgatggaggtgccgccccaccggttctcaccaagctggggcttcacgtaggccagccgcctaccagagggcagggtgatgaacaagatgccggactcggcagtgaagcgaaggttgcgcagccgaacagcctggcgggtggtgatggcgtcaagtgcggcctgctcgacatccgcccagagtcgcacgatgttggggttggctgcccgccaggcgtcgacgatgggtttgagttcgtgctcggccagccccatccgtagggcacccatcgccttgagcgctccgacggagccgttgtaaccgcaggccagcgtggcgatcttccccttctggcgcagctcagcgttgatgccgtgtttttcgacggggacgccgaacatgcgcgacgcggtctcgcagtagaggtctttgccgtcgcggaaggctgccagggtggatgtttctccggcgagccaggcgatgacgcgagcttcaatcgcggagtagtcggcgacgatgaatcggcatccggcgctggggatgaacgctgtccggatcaactggctgagcgtgtctggcacggagtcgtagagcagttcaagggcgtcgaggttgcgttgtcgggtgagggtgcgggcttggtcgaggtcgggcaggtagttacggggcaggttttggacttggacgaggcgtccggcgaatcggccggtgcgtcccgctccatagaactggataaggccgcgtgccctaccgtccgtgcctgtgacgttatgcatcgcctggtacttcttcaccgagcttttcgcgaggtcgccgcgcagctccaggacttctttgaccttgcccgtggcggactcgagggcggcttcgacatcagccttcgccaaggacgacatctcgcagccgtgggtggtgagccattccttcaactggatcggtgagttcgggttctccaacccggtcaactcccgcgcccgcgccaacgtggcggcacgatgctggtcgtccagggcgacggcagcgtctgcgagggtgtggtcgagcaggatgccggtgtcgttgatgcgttgatccagggcgtaggcgtcccactcggcttcgggaatcggaaacgatgagagccggtcgtggatcgcgagttcgacctcgacgtcgcgctggttgtagtcgatgaactgagcccagctggtcgggtcgctgctgggcaggttacgggtgccgccaccgttgagcacgctgggtgtggctggcgtgcagaattgcttgatcagccgcttacccgccgtatccttctgaacgtcaaggtcaagagccgcaccgaccgcatccaagctcatcggcagaccgagttaagccgaccacaccatcgtgcagcgccactggctcgggtcaagaaacccggccgccaacagctcggggtaatgacgctgcagccacgcggagagcgcgacccgctcgaaggcggcgttatgcgcccacttgaccacgcccgggtccaccaatgctgcgagcacctcgtcgggcagcccaccaccactggcgagatcgacgacttccaccgggccgccgtcgatcgagtagccgaagatgaggaggcggaagtcggggtgttcggcatacgggtagacgccggttttcgctaggggtgctgggctgaaggtttcaatatcgatagcgatctggcgcatcagggctcctggacagtcgggtaggcgaaggtgagggagccaaccggtgtttggtggctccctcactgctggggtgctacttcgggtcgaggttgtaggtggcgttcatcctgtcgagctcggccttctccttggcgatcagctcatcgatgcgctgacgttcgcggcgtttggcccgcttgtccttaatccagtagtagccccagaccatccagaacgggatcaggacgtagacccacacggcgagggtgatggcgttgaaacagtcactcatgattcagcctccttagttgaggaagtcgtcggccggcgcgccgaagtcggactcagcggagacgcggcctgcgccaaggggttcaccgtcgcggatcttctgaatgttgcccagcccgcacgccacacccttgttcccgttcgtgttgaacgcgtagaacgacagggagacgcgggcgtagcaacccgagtacacctcggaacggtcaaggatcggagagacgttctcgtccacaacctgcggcggagtgaggctgttggcgttgacgaagaagctgtttgcgtaggcttcgtcgtcacgctcggtatccccgtcacgcagcggcagcttcagagccgccttgttggggcgcttgcctccgaacttggccgtaccagcgtcgatcgccgcgtcgatggccttctcgatagctgtgatggtggtggtgtcggccttcgggatgatcagcgacacggagtacttgggcttgccgccctggatggagttcggctcccacacgtgagcgtaggagaggcggacttcgccggtgacgacgcgggtggggttgttggttgacaaggttgttacctgctttctgttttcgtgaattcggtttgtgcgctgtggatttccagcgcgggtcgtttgtcggtgtcagacacgagcgtcggcttacccacgggcttgaccacgaggtcgccgagcacctcgttgaaggtcttcttgtccatgagccgttccatcgcagtgagcgtgatgagtctgcggtcgtagatgtcggcgtacccggcagcttcagccgcttcggcgacggcgttctcctccgtgtacttgcggacagaccgtccggcgacgagcttgaaaccatcccagtgcttgccctggttcaccgcctgcgagagcgcgtaggcctccacatccgcagcccacgttttgagctgtggaatccttgtcagcacgtccgcaatctcgctgccggacagctcggccggtggggcgaactcgtgctgggcgagcgcgaggttggcttcggcgcgtgctcggcacgtcggtgcgatgcggcagaactggcaccacgagccgggacagaactcgcccccgcccgccgcagccaactcggccttcggcttcacctcggtctcagcccatgcgaggaggtcggcgacgctggtttcccaagtgtcaacgttgccccgccggggctggtagatcgtcaccgcaacatcggtgatgtcatacaagtccccgaaagcgtggacggctccgagcgcgtacaacatgagctgcgggttgtgtgcggcctcgacgaggatgccctgcccgtacttgagatcgatgatctgcagcttgggttcggcgatgatcacgcagtcgccggtaccgaaaccgcccggcacgacgtgggagaagtcgaggcgctgctcgatcagcacctgcggatcaccacaggcctcccgtgccagtgagatgtgttcctggacgaaggcgacgtagtcgtcggtcaggtcctccatctcggtatcgatccagccggactcgggcttgaaagtcggcgcgtcgttcagggcacgccggagcttccactccgccagggcgtgtgcgacggtgccctgctcggccgccgccgacgtcgagtccggctcacgggattccagcaccgcgctgggtgggcagttcagccaccggtgcgcgcccgacgccgagagcagcgcatgctggtcaggcatcggacagctccttcgccttggccagcagccacccgtacttcgtcgggtcaaccgccgacagcttgtccgcgccggtggcgacgatcagctcacgcacctgctcggtcatgccttggctggagagcccggcgagcactccacgcacctgcgccagcgacaccggctccggctcaggtgccggttcgggtgcctgtcggtgggcggcctcgtactcagcggcggcctgctccaggtcgggttgtgcgagcccggcggcggcgatcggacgagcgccgggcatcccggcgtgatcctcgaacccctcccacgcggtctcctcaattgcggcggcgagcatggtgacacctgccgcgtcggccagcgccatcaggtcgtcgtcggtgtcggcgacacgcacctcgacggtggaggcttcggagccgggcaggagcacggccatgcggtgctggggtcggctggtgccgaagatcgcgcgcagcatccgcctgctggggcggatttcttttgcagcgagtgcggcagccgggctgggatgcttggcgatcttgatcttgagcttggtgggcatccgggtttccttccatgtgagtggtggtacgccccatcaccgggctggtgaagggagtgccttgcatctgtcaggcatgggacgcaccgaaaccggacggcctacgactcggtgagtgttttgcgcagttgggccagaccgcgcgagacggctttccgcaccgcatcggcactggtcggctggcctgcgccggtcttgtcggcggcgatctcggtgaaccggtcgccgtggagcacatgcagctcgatgtactcgcgctgcgtcgcagtcagcggactcagcagttcgaccaccgcgaggttggcctcgacctgctcggtgaagtccggatcgtccgaggcgaagtaatccgcgcccagcccgccacgctcgtcgtcatcaccgtggccgggttggtcgacggagatgtcggagcggcggcgattgtccagctcgcggtactcggcgtacacgtcgtcgaggtaggcgcgagcccacttcggacgcgaagccgggtcgcgcagctgggcacgcagttcttcgctgtcgggcaggtcagggacgggtaggtcgatggtgttgcccctgggggtcaggtacgggacagtgaattgtctgttgaatgccacgtgagggcttcccttcttgcgaagggagaccccgttgagggcaaccgacgagagaccgtggtgttgagcggaaacagtgacgggcaccaacccgacccgggggtgaacccgggtacaggtggtgcccgtcaagcgctcaacggaggtctcccgaatacggttgaaaaacgcatgcgggtgtaggaggaaggcggccggccggtgaccggtacggctttgaccgccacagcggttgggctgtcctgccggatgacgtctggccagcaggacagccgtgagggctacttgcccttacgcggcttggcctgagccagcgccgaggctgcgaccgacttcgtcttggccgaggtgcgaccgtcgcgcagcagtgcggacgccttcttggcgaccggtcgagacgtctgcttcgtgtttcgtgtatccatgtccctgttcacctcctgcctcagctcgctccgacacggttacgcgttcatgaagatgaacgcgacaagagtgaagcggccttgtaagatcgaaggaacacaggttcgctgttcgcccttgtggttctaggttccccgatgacggttttctgatcggctgggaagcgatgggcagcgatgggtcgcgatggagaggcggtgcggtggattacaagtcgagcttccacgccgtcttggcgacggtgcgcccgctgatgaaaggcacccgtaaccttggcgagttcaccgcaggtctcatcgacatgggactcgtgcctcgcggaaccgtctacggcgagaagaccgcgcttgagatgcgcaagtcggcgacgtggaaggggtacgccaacgggtctgaccagctgcctactgtgttagcgagcgagctggctgggcgatgggatcagtttcggttcgccagcaacgtctcccaggcatacgaggagtcggcactcaatgacctagccgaccggctccacgaccttgacgagtcgatcaacaagggcaatgtcaccgaaggtctaggccagctgttctacaaggtgttcaccgaagctgccggtgagaccgctgccgtaacggagcccttgactttggcagacaaggccgaccgatctggcatcccgtacattgacgagaagacgaatcgcctcaggcttggcgaccgctcggtcgcgttaccgccgaagcatcccacaccggacacagttcagcctgctgagctggggtatgtttcggcgctcctggccgcgcattgcgaagacaaagcccgtaccggcgttgaggtgcagctggacgacatcccgtcgcgtctggttcaacacttccaagaacagcgcaaagcgttctaccgtgccgaatgggtacgagaaacatcgtggaactgcatccacgatgggcggccattgtttgacgagttcttggaaacgatgcacgcgggagtctccgacaccaacttgcgtcagtaccccaacggactcgaacgcctcctcgcgacactggctcaagcagccgcagtccaactcgacggtgtccggctcgaccagatcattgacctgatcgacgtgtggagccggaaaggttcctgccacgaactcgtcgcccggaaccggctgggatgggtagattgatgcgcgccacgtccctagacacaagtttcgaagctgaactgcgcgggctcatcttgctgttcctgctcggagatgcagcggatgccgactacctgggtgccctagacaccatcaccgtcaacgcccacaccttcggggtcggggcagagaacctcaacggcacccaccgactggccagcggggaactccacacgcgcacagtcctgatgacccaagctctccagcatttggcgatccaaggattcgtgacactacagccagatcgttctccggcggccttcacgattaccgctgagggtgaatcagtcgtcaaccatttccgctcccgatacgccggtcagttgttcgacaccgcgttggagacgatcgagcgggttggcgacctgagcacgagcgagctggctcagatcatcaggtcagcgaccccggaaggagaaacgcgatgacaccaggcttctggatcagcagcatcaccgtggccgggcaccccactcggcgggactccagcgtcggtttcgaatctggactcaacgtcatctacggaccgtctaactccggcaagtcctgggtgcttcagtgcatcgactacgtgttcgggctgaaagccgacgagttcgtcctcgacgaaaactccggctacaccgaggtgcgtatgggggtgcgcaccgcgcagggctcactcacgttatcgcgccccatcggtgagggagccaataacatcgaggtctccagcacagacccacgaattgagtctggaacctacaaacgtcaatcgtctggccgttccccgctactcagctcggtgtggctcaaactcatcggctacgacgcccctgaaaacctgaaaatcatcaagaatcaaaaccttgaaacccaggcgttgacgtggcgcaccttctggcatgcgctgtacgcggatgaagaccggatcagcaccaagaaaccaatccttctccctcttcagaccaccgcacagcccgcgttcaaatgcgccctagcgtcactgatcaccggcaaggactatgccgcctacgctcgtgatgagtctgtcgaaacgaggaaattgcgtaacaacgcgatcatcgactacctcgagccgctacccaaacagcttgaagaacgaatcgagttgatcgacaaagcactcggtagcagcgacccagcagagatccagcagcgcatcgatgagctgatcgcagaactggaacgtgtccagcaacgcatcacacacgccaccgtgcaggggcaagacgtcatcgcacgcctccaacaggtgcgtgactcgctggcggaatcccgcagtctgcggaaccgatacgaggaacttgccgcctcctaccgtgcccgcatcgagcggttcgatttcgtcgaggaaggccacgccctcaccgcacacagggaaccggcaacaacctgccccgtatgcacgcaggcactaccaccggaagcgcgatccgcagttccagagcccgatctgcgtgaacgccacgacctagctgcccgactcaacgatcttcgtcaaacgatccatcagatggatcttgaacaggcaccactgcaagaacaagagcaggatctcgccgcagaagccgagcgcatcgcccggcgcatcagcggcgagttagagccgcaactgcaagccctctcgacttcgcttgccagccacaacgcgatcatcgccatgcaggcagaaagagaacagcacctcgaacgcaaacaagccatcgaagacgaacttgaagaacgcaagaatcgcacattccccaagggcaacttcaatccgctcgacgaatacccgaaaacgttctggccgcagatgggcaccaacctgctcgacatccttggagcctgcgcgttccccagactcaaagatgcccgattctcgcgtgaactgttcgatgctgtcatcaacggcaaaaccaaagcggaggaagggcagggctaccggtcgttcgtcaacaccgctgtcatgctcgccctccgggaatacctcgcctccgaggacgccacacacaaccccggcctgctcatcatcgacaccccactactggggctcgacgatccacagctcgaccccgagcttcaagaagcccgtgaaaccatccccgctgccctctacgactacctcgccctcgaacaagacggcggtcagatgatcatcgctgacaacaccaagttcatgcccgacatagaaccactaaaggaccgatgcaaactcatcgtattcacgaaacgcgaaggagaaggacgctacggcttcctgctcgatgcccaggacgaagacctgatcgatctggaggaaacagatgacaactaaccgcgccttcagctacaagcccctctggaaactcctcatcgaccgcgacatgaacaaaatccaacttcaagaacgtgcaggcatcagtccagccaccctgtccaaactcggacgcggcggcaacgtcaccaccgacgtccttgcccgcatctgcgaagcactcgactgtgacatcgccgacatctgcgaggtcgtccccaccgacctgaagggagagaccgactagatgaccgctcaacgcctgcagctcacctggtacaacaaggacaaggctctcatccccactgagaccggcaagtacggctacacgtgggttgacccctctgatccgcgctactgcgaaacccacaccctcgtgctggacgactatgtgcaaggcagccagacaccgaagtctgacgagttcgcctactccgagcgcgctgacctggagccccaggatgacaacctgctgatcttgggtgaatcgggcgatgtcctcgaagccctcacccgcgtgcccgagcttgccgagaagtacgtcggcaaggtgaaactgatctacatcgatccgccgtttaacaccgcgcagacattcgcttcgtacgaggacaacctagagcactccatctggctgaccatgatgcgcgaccgactgcaccacatgaaaaagctgcttgccgacgacggctccatctgggttcacct

SEQ ID NO: 70 - DNA, 25150 bp, Propionibacterium acnes
  source 1..25150: mol_type = genomic DNA
ctggggccaggtatcttacgcctggccccagccacgaagcagatgacaaactcagtagatgaattcagctagagcttgacatgctgccctcttggtttcttcgctaggctcaacgcccgagtagccgtatgccccattggaaccgtctgtgagaaggccaacgtatctgtcatccaatgggccatcaatttctgcaaagaacttgtcctttgcggttcctccgtcgcttgcaccaacactctcagagatcgccttgaatcgctgcaatagcgaaactggattgttgtagtagctcctcagcgttcgggacagaaggttggggtcgtcggctcccgagcctttcagcatcgcagccagtttgatcgcatccccgtcgctacacaggtcggagtagttgcagttgttcggcagatcattggggatggtcaaaccttgaagtccgctgtgattcttatagttatccccttggccaacaagagcccttgctattgcaataatgtttgagccgggattcaggtcaacaaccttttgaatcggaccgagcgctgaagctaagtcacccgcccatcccgtccacttatcaggaacgagcgggttcaggttgatgtagcccagggtggtcacgctcatatgcgggatatctactgcaccacctgcggggtccgtccattcttgtcgatcggagcgaatccacttattcaaggcagagattatctgagacgcttgagtgtcatcttccagccttttcgcgtccgcctcccgatatgcttcagctgccgcggaccactttgcgcttcccttgaggtagaccgttgataggtagttgaggacacatcgccaagtcggaactttgacccaagtaacgtagctgccggatgtgatcggatcctctccgaaagcgtagtccttatagaccacgcgcaattcctcgaaccggctctcaagcgcttcgatcagatcgagaaaatctagagcgtcgtaattcactggctgcgcgtggcgcaccgacgaatcggctgacatgcgacccgaatatgccacgcggtcaagatcccatttcccccgatatccactgatttcgtggaactgatcaaatacccagttgtcggggatggggaaaccgagattacctgagaatccggtagacatgtcagaaacgaatgatgctaccgcgtatccagcctgagctatccgggtgcagatgtttcgcgaggcgtagatacccactcggtagccgccgccgaggctttgcgttactgccttgaagtagggcaggatgtggctggtcacctgaggatccgtggcatcgtagtcaacggcgaagtagatcactgtaggtggaacaccaagtcgttgggcagcggtttgggcctctttcgcatgacggtgcccattttcgacactaaagtacttaagttcagttgagtactcttgaaaaattgggaaatacttcagcccatgaccaacgattcgctctagctcgcctgtgcggagcgccttgaaatagtctgcctcagacttactgctttggttgggttcactgagatagcggcctacgatctgataaccatcagccttaagatgtccagcaagctcgtcagtgatctcaaagcgcgtatcgcaagccacacatggccgattggggtcgcctttagaagtgagcaggctcatccatgtggttgggtcgaccaccccggtcactggcaaggcgtgtgcttgctggaactgccacagcgtgttgctgatttcgctgttccacgtgctggtcggcaaaatggagtagccgttgcagaccagactcacagtggctagccatacccactggttagtgccgctactaattgtccgtagtttggagcgagtgcctgcaccaaaattcccggtggcttcggcaggtgtgtatccttcgattgcttggaggacctggattaaagccgtgttcatttcacgcccgtacaagccatcagtgggaatgatccctgtgtagttcttgtacccacggttaatcgcttgctgtgcctgacgaatagctgtcttgccgccgtaggcagagagtaaccggaactgtttcattgacagaagcgccatcattagttcaacatcgaccgttgcgctcgtatcgccaaggccaatatcgactttcatctggcgaatagagtcggccaagtggtcggtaaactcaagagtgatgccaccgtattcggctcgatatcccttgcaccacaaggctccttgaataatcccatgaacattgtcgtagccagaagtttgagtaatgccgtttggccaacgagacttgaatcgagactgtgttccagaaccgaaattgtttgccgtcgctgtaatacccagttcgatttgcagagcgcggatgagtgcgttgattgtatcccagccagtgttaccggtttcttggactgagccgaacccagttttattgccgtaagtcgaattcagccactgctgagttttcagcaccatttgatctgccatgattcctccttcagaaatcagttgttaactcgaggcaggcgaacacctgccacggaggggtccagaacaccggatgagaagctccgagttttttgccctcgcctgtacgtcaccgggaaacccgaatccggacggcaagagcgaaacttcgcgagtttcatccctcactggtactgccgacgaagcccgaagtgttaataccctgtttgattctgggactttgcgcgcagttggccccgcccgctgacctgtccgagcgtcgtagagatcgagaggccccaaccccctcgccagcgccgccaggttcccccgtgtctgccgatcagcaccgaggtgggcatctttgaggtttcgcaacctcggcgcgacgtggcgcgacgtggcgcagatttcagtaggtgtagatcctcggggtctgcctccaccggtcgccgtcgagcgccgactggcgggagtggcacggcttacacaaactgcggaggttggcctggtcatgggtgccgccgtgctccaacgggatgacgtggtggacttcctgcgccggggtgtaccggccagccgcgaggcagtcctcgcacaaggggtgggcggtgatgtaggcggtacgaatcttgcgccagcgggccccataacgtcggttgatcttcgggtcacgctgccacttgcggtagcgctcgtcctccgccttggcgtgggcttcgcagaagcgggcgtgggtgaggttcgggcagccgggctgggaacacggacgggcaggcttgaccggcatcacgcacccctttcccggacacggcaaagccccaaggcacccagccgatgaccgggcttgccctggggcttttcctacttttcaaccacctacatcattgcaggcccgaaaccctaaatgcatccgcagttcttgacaccttttggcggctaggttcacgcggcctgcccatacagcgccgacgccagccgggcgagcgcccgaaacttcttctggtaggcgctggtgcgctccacgtagaagtggtcacacaccgtttgcaccgcctcatcctgggtaccgtcgccgaggaagaatgcttcgagcacgaacctgtcgtcgtcggtgagcagctgccaggcgggcaggaaccacgccatgtactcacgcgcctgggcgtaacgggcacggtagatgtcgatccgatccaacgtggccgccacccgcatctccccagcatgcagatccgtgtggcggggcatcccgtcgagtttcgatgaggctggggtggtgacgtcgtcgtaggcggtcttgatctgctcgtcggtggtgtcgatgatctgctccatcacggcgaagtcctgcaatgcgctgatggctgctttgcgggtgtcgaggtatttggtcatcacatgcatgacgactccttcctgcttatggttgtgagttcggtggcgaccgcgtcgatcaatgcggcctgggtcatgtccttcgcctccagcgccttgaggacggcttggtcgagggtgccggtggcggtgaggtgggtgatggtgacaggctcggcctgtccttgtcgatacagccgggcgttggtctgctgatacagctccaagctccaggtcagcgagaaccacacgagcaggtggccaccggactgcagattcagtccgtgcccagcggaagcggggtggatcaggccaagcgggatgtcgccccggttccacgcctcgatgtccgccgacgtcttcagttcgcgggcttgtgggaagcgacgctggatgcgttcgcggtcgtgtcggtaccagtaggcgacgaggacggtttggccgttggcggcctcgatgatgtcttcgagggcatcgagtttcgccccatgcacctcgaccgtatcgccgtgctcgtcgtagatcgcacccgaggcgagctgcagcagcttgcccgacagcgcggctgcgttcgccgcatccaccacctgcccatccagatcaaccaccaggtcggccttgagctgctcatacacagctcgttctccggctccgagcaccacgggcgtggtcgtcaccgtcagatcaggcagcgtgaggtggtcggtggtgcgcattgacaacgtcatgtcggcgatagcgtcgtagatttcctcctcagcgcctgccctcggcttgtacgtgaacacctgcatcccgttgcgcttatccggcaggaaccacttgtcgcggtagcgggtgatgaatctgccgaggcgttggccgccgtcgaggagccggaattgcgcccagatgtccatgagcccgttggaggcgggggtgccggtcaggccgacccagcgcttcacgtgtgggcgcattttcaccaacgccgtgaaccgcttcgcacggtggttcttgaagctggagagttcgtcgatgacgaccatgtcgaacggccagctatcgccgtactgtctgacgagccaggggatgttttcccggttgatgacggtcaccatcgccgacttggccagcgcgtcgagccggtcagctttggtgccgaccgcgaccgccaccgatagaccttggaggtggtcccacttggctacttctgctggccaggtgtcgcgggcgacccggagtggcgcgacgacgagcacccggctgacggtgaagtagtcgagcagcagctgccagattgccgtcagggtgatgacactcttgccgagtcccatgcccaggaggatcgccgcttcgtggtggtcgaggatgaaccgcgtggcggtctgctggtagttatgcggccggtagcgcatcaagcacctccttgatgccgtccaccgagtcaacgaccagcgcggtgaagccgtgggcggccagttggctcatccggcggcgttggatcggccgaggcttcttgccgggggctttcacttcgacgaagacgacctggcctcccatcaggcatagccggtcaggtacgcccgtggttccagggcagacaagcttccagcacaagccgccggatgcctcaacggccttcttgagctgggcttcaatgtggtgttcgttcatggtcactccttgagtggtttcccacgggggtgacgactggtgacgggtggatctggacttttctaaaggagatatttttgtggccttagtaatagttcaatactgatcgtcaccggtcgtcaccctcatcgggtttagctgttgaattcgctggtcagagccagtccgtagacgtacatgccatgcttggacttgcgtcgttcaaacccggattgttcgagagtggcgttgaagtcggccatcggccgagcccacccgctggtggattgcgcccacgctcggtactcctggtacaggtcaccggcgcgttcggatagggacgggtccacctcgcagcgggcgtcgaggaattgggcgaaccagttgttctcttcccgatatgcgcttgaggcagcgaccacttgggcgggtggggtgagctggtagtcctcggcgtggatgagccgcgagccttccatgatccatgcaagtaccgctccgccggcggtctcgtagaggtggtcggcgtagttcttcacatcggagctactctcgatgaccgcgttgaacgggatcacgatgagcctgcgccagatgcccgcatccatcgcgcccaccctgggcaggtgattcgtgtagaggatgagcgtgtgggatggggtgaacgcgaacggtgccttgtatttcttctccgcgtagatctggtcggtggaggcgagttgcttgaccgtggaggtggataggcgcacgccttcctcggactctgcggcgatgatgagccgtttgcctttcgcttcggcaagctcaggtttgacgttccggttcccgccaatggtgagcacgtcggcggacatgttgcccgcatacgtgccaagcactctcgcgatagtgttccagaacgtggacttgccgttgcggccgtccccgtaggcgatcacgagggcttcgaccatgaccgtcccgatcgctgccagcccgacgatccgctgcacatacccgatcagctcccggtcggattggaagaacacgttgagcgcccggttccagatttctgcgcccgtgtcggtggggtcgagcgcggtttgtttcgtgatcagatccagcgggttatggtcacgtcgggtgccgtcacgcacatcccacgtgccgccaggcgtgttgaggagatacgggtcagcgtccagccgggctggggtggtcagcaacatcgggtgtgcttccctcaggcaggaggtgatcgcccgggactcgcggcgtttcaacacgaacgcctcgtatgccttcgcgtcctcaaatgcccggtaggcggcccgctgcggtgaggtgaaaccgccgagtgctttcgctttcgacgatgcggctgcgagcaccgcgttcgcgcccgtcaccatgagctcgtcgcgggctttctccagcagatgcccggcctcggctagttgccggtcggtcagttcctgggcgatgccttgcgcagcaggcgcagactcagaccacacaccgccttcgtagacgagccagtccgtggcctccgtaaacgccagacgcgacgagtattctgcggtgagcatggatgcctgcccgacatcggtgaagtcctccggccgcaggctcgtcagctccgcgtaggcttccggcgacagataacccggctgcgcctcgactttggcggcgaaccggcaggcgctttgccagatcgactccaactcgtgatccgacaggggcggttcacacagggacgctttccggtcgaacaggtcacgagcttgggcggtctgcccgtaacggatcaggacgcgtccggcgaagcgggagagggtggcgttgcgggagccttccccgatcacctgcgtggaagcgtcgaacgcggcgaacacgtcgatctcgtcggcctcatccagccaggcgtcgagcagctttgtgccgttgtggatggtggtttcggggttggtggtgccgtagatgaaccgtccggcatccaacgcctgcgggtcgaagaacccgaaccgtccagcgaggcggcgcttcaaccccgcataggtgtcggcgtcggtgaccgggctgattgggaagtagacgtggaagcgaggcctggccgacagcgtccttttcggcttctggtggttacggctggtggcggtcatgaactcaacccccgccatcagctcggccaggtcatctggggtgatccactcgtcggggttgtcggtgtggtcgttgtcgatatccatcacgacacagtccgaggagatgaagctcgccgaggagcgccggtcgccggtgtaggtggcggcgacgtgatccaaccacgccacctgctccagcgaggtttggtcggtgatgtggtggtggttcgggtaatggttattgtgcgggttgccgctactcgtggcggcgcacaaggtgaacggagtcatgcgggatgcacctcctggaagtcggcgtcgaagaagcggatcgggatatccatctgatgggcccagtcgatctccgcccgcatccccgggctgaccctgccgatataggcccacagctgctcgcatttcgacagcaggatgcggttgaaaaacatcgccagctcccgggcatccgggtcggtgtcatccatgaactgcggataatgcaaatgcggagccaacgggatctgacgagcctttaccgcaaacgcacaaaaccggcgggcaagctccacgttggctgctatgtcacccgagtacggggagcagatgtagaccaatgggcgttagccgtattcggcgagctggatttctttcagcgcctggtagcaggtcgggtcggggtatccgtcggcgttgcgcagcggaatacccacatcgatggtggcggtcatcaggcgccctgaccttcacgttcgatcaccggcagcaggccacgggtgttcttcaacaggtcgtagatgaacaggcgacccttctgcgtccagtacatgtgggtgcgggtcttgccctcgtcgtactcgtgcgtcttggactgcgtgtagccctgctcggcaaatttcgcgtagaggaaccagcgtccggactggtggaactgcacctgctcctcgcgcagaatctggttaagcttcttcgccgacagcccgtagtccttggcgatctctgtggcggtgatcagtgagggcgatgccagcacgatgtcgtagtacgacaccttcggtgccgcctccaacaaagcttgctcggcggcgagccgcttggcacgttcagcccggagcgtggtgatcgcccgctccagaaactcgtcgtcagcgagcagttcgtcgatggcgtagataccatgtcggcggatcgtcggcagaacctcgtcgaacacccacgtctcgaacttctgggcggcaggaagtttggaagtgacgatcagccggtacaggtcgccttcgctgatgaacctgacctgctgaaccccacctgctgtttcaagggggtagtgattcacgactcccttgcagtgacgtgccagagcgtccttcgtgttggcgtagccgagggctgtagccacgtccttgccgcagaacaggatctgcccgctagaggtgatggttcggattgtgccgaactcgtggttggtgaacacttgtagtccggtagccatgaccagctcctattctgagagccaagtagacaatcggcggcgcggggtgcgccaggctctcacctgtcaggcacggcagacaccgaaaccggacacggcttgaggaaggctctcgcccatacgcccccgagcaccgacaaatccggacgggtcagagggcacactggtgtgtgaacgtaccgataactccgtgccccgtgctcttgcttcggcgtcatcaaccaggtagccttgtagtcaacatgaccggttccgctgcccgcctcggtgggagtccagggccggtcttcgtttttcgtatcaaacaggggtgcgcgtggagcaggtgaagcagttcaagacctacggtgaacaggtcgaattgcttcgtcagcgtgggatgcgagtgaatgatccccagcatgctgagacgctgctggcgcgattgaactactaccgcttgtccggatactggtacccgatgcgccgtttctcccaaggcgacggcactgcccgagatgaattcgttgagggagcatcgtttgacctggtggtagccctctatgggtttgacgaacaattgcgccacagcgtgttcatcgagcttgatcgcgtggagttggctattcgaaccaagctcggtcacgaactgggtcgccttgacccgctgatctatttggatcccaagcgtttgagcgcccgggcacggcagcgaaacaaagacgggcgtagcgtgcacgaggtgtggctgagaaagtaccagtcggcattgaaagcgtcgaaggaggacttcgtcgcccaccacaaatccaaatatggcgggactctacccatctgggcggctgtcgaaatcatggattgggggatgctgtcgtacctgtacggcatgtcgcccaatatcgtgcgcaaacggattgccgagccctgcggcctaactggtcctcagcttgaatcatggctgaaatccttgaatattctacgtaattacgcagctcatcatgcaaggatgttcaaccgtgtttacgacatcaaaccgaaactgaacaatggcgtcaggctggctccggtagctgaaggaatgaatcgcgtgttcgggcagctctcccttatccaatacttgcaccgccaactggacttgtctccagccgaccggctaccgaagctgttccacacctacccgcacaatcccatcgtgccgttttctcgcacaggagcacctgacaactggcgcgagttgcctctctggtgcgtctaatccttgcggtagtagtcgcattcgtacccgtcggcgtcgagtggcagtcctgctgcccagtcgggtggggtcgtcatgagctggcaggcatcggcgatggtgaagccggagtcctcgggttcgtcgatgacgatttcgtcgtggacgtgcatgacaatcttgtgcccagcctgagcgacgagtgtcatggcgtggacgaggaggtcacgagcgactgcttggacgatgttctcgacgagtttcccgccgtaggtctccagccgcccccacttgcgtccggtcgtgacaccgctgtaggtgatggaggtgccgccccaccggttctcaccaagctggggcttcacgtaggccagccgcctaccagagggcagggtgatgaacaagatgccggactcggcagtgaagcgaaggttgcgcagccgaacagcctggcgggtggtgatggcgtcaagtgcggcctgctcgacatccgcccagagtcgcacgatgttggggttggctgcccgccaggcgtcgacgatgggtttgagttcgtgctcggccagccccatccgtagggcacccatcgccttgagcgctccgacggagccgttgtaaccgcaggccagcgtggcgatcttccccttctggcgcagctcagcgttgatgccgtgtttttcgacggggacgccgaacatgcgcgacgcggtctcgcagtagaggtctttgccgtcgcggaaggctgccagggtggatgtttctccggcgagccaggcgatgacgcgagcttcaatcgcggagtagtcggcgacgatgaatcggcatccggcgctggggatgaacgctgtccggatcaactggctgagcgtgtctggcacggagtcgtagagcagttcaagggcgtcgaggttgcgttgtcgggtgagggtgcgggcttggtcgaggtcgggcaggtagttacggggcaggttttggacttggacgaggcgtccggcgaatcggccggtgcgtcccgctccatagaactggataaggccgcgtgccctaccgtccgtgcctgtgacgttatgcatcgcctggtacttcttcaccgagcttttcgcgaggtcgccgcgcagctccaggacttctttgaccttgcccgtggcggactcgagggcggcttcgacatcagccttcgccaaggacgacatctcgcagccgtgggtggtgagccattccttcaactggatcggtgagttcgggttctccaacccggtcaactcccgcgcccgcgccaacgtggcggcacgatgctggtcgtccagggcgacggcagcgtctgcgagggtgtggtcgagcaggatgccggtgtcgttgatgcgttgatccagggcgtaggcgtcccactcggcttcgggaatcggaaacgatgagagccggtcgtggatcgcgagttcgacctcgacgtcgcgctggttgtagtcgatgaactgagcccagctggtcgggtcgctgctgggcaggttacgggtgccgccaccgttgagcacgctgggtgtggctggcgtgcagaattgcttgatcagccgcttacccgccgtatccttctgaacgtcaaggtcaagagccgcaccgaccgcatccaagctcatcggcagaccgagttaagccgaccacaccatcgtgcagcgccactggctcgggtcaagaaacccggccgccaacagctcggggtgatgacgctgcagccacgcggagagcgcgacccgctcgaaggcggcgttatgcgcccacttggccacgcccgggtccaccaatgctgcgagcacctcgtcgggcagcccaccaccactggcgagatcgacgacttccaccgggccgccgtcgatcgagtagccgaagatgaggaggcggaagtcggggtgttcggcatacgggtagacgccggttttcgctaggggtgctgggctgaaggtttcaatatcgatagcgatctggcgcatcagggctcctggacagtcgggtaggcgaaggtgagggagccaaccggtgtttggtggctccctcactgctggggtgctacttcgggtcgaggttgtaggtggcgttcatcctgtcgagctcggccttctccttggcgatcagctcatcgatgcgctgacgttcgcggcgtttggcccgcttgtccttaatccagtagtagccccagaccatccagaacgggatcaggacgtagacccacacggcgagggtgatggcgttgaaacagtcactcatgattcagcctccttagttgaggaagtcgtcggccggcgcgccgaagtcggactcagcggagacgcggcctgcgccaaggggttcaccgtcgcggatcttctgaatgttgcccagcccgcacgccacacccttgttcccgttcgtgttgaacgcgtagaacgacagggagacgcgggcgtagcaacccgagtacacctcggaacggtcaaggatcggagagacgttctcgtccacaacctgcggcggagtgaggctgttggcgttgacgaagaagctgtttgcgtaggcttcgtcgtcacgctcggtatccccgtcacgcagcggcagcttcagagccgccttgttggagcgcttgcctccgaacttggccgtaccagcgtcgatcgccgcgtcgatggccttctcgatagctgtgatggtggtggtgtcggccttcgggatgatcagcgacacggagtacttgggcttgccgccctggatggagttcggctcccacacgtgagcgtaggagaggcggacttcgccggtgacgacgcgggtggggttgttggttgacaaggttgttacctgctttctgttttcgtgaattcggtttgtgcgctgtggatttccagcgcgggtcgtttgtcggtgtcagacacgagcgtcggcttacccacgggcttgaccacgaggtcgccgagcacctcgttgaaggtcttcttgtccatgagccgttccatcgcagtgagcgtgatgagtctgcggtcgtagatgtcggcgtacccggcagcttcagccgcttcggcgacggcgttctcctccgtgtacttgcggacagaccgtccggcgacgagcttgaaaccatcccagtgcttgccctggttcaccgcctgcgagagcgcgtaggcctccacatccgcagcccacgttttgagctgtggaatccttgtcagcacgtccgcaatctcgctgccggacagctcggccggtggggcgaactcgtgctgggcgagcgcgaggttggcttcggcgcgtgctcggcacgtcggtgcgatgcggcagaactggcaccacgagccgggacagaactcgcccccgcccgccgcagccaactcggccttcggcttcacctcggtctcagcccatgcgaggaggtcggcgacgctggtttcccaagtgtcaacgttgccccgccggggctggtagatcgtcaccgcaacatcggtgatgtcatacaagtccccgaaagcgtggacggctccgagcgcgtacaacatgagctgcgggttgtgtgcggcctcgacgaggatgccctgcccgtacttgagatcgatgatctgcagcttgggttcggcgatgatcacgcagtcgccggtaccgaaaccgcccggcacgacgtgggagaagtcgaggcgctgctcgatcagcacctgcggatcaccacaggcctcccgtgccagtgagatgtgttcctggacgaaggcgacgtagtcgtcggtcaggtcctccatctcggtatcgatccagccggactcgggcttgaaagtcggcgcgtcgttcagggcacgccggagcttccactccgccagggcgtgtgcgacggtgccctgctcggccgccgccgacgtcgagtccggctcacgggattccagcaccgcgctgggtgggcagttcagccaccggtgcgcgcccgacgccgagagcagcgcatgctggtcaggcatcggacagctccttcgccttggccagcagccacccgtacttcgtcgggtcaaccgccgacagcttgtccgcgccggtggcgacgatcagctcacgcacctgctcggtcatgccttggctggagagcccggcgagcactccacgcacctgcgccagcgacaccggctccggctcaggtgccggttcgggtgcctgtcggtgggcggcctcgtactcagcggcggcctgctccaggtcgggttgtgcgagcccggcggcggcgatcggacgagcgccgggcatcccggcgtgatcctcgaacccctcccacgcggtctcctcaattgcggcggcgagcatggtgacacctgccgcgtcggccagcaccatcaggtcgtcgtcggtgtcggcgacacgcacctcgacggtggaggcttcggagccgggcaggagcacggccatgcggtgctggggtcggctggtgccgaagatcgcgcgcagcatccgcctgctggggcggatttcttttgcagcgagtgcggcagccgggctgggatgcttggcgatcttgatcttgagcttggtgggcatccgggtttccttccatgtgagtggtggtacgccccatcaccgggctggtgaagggagtgccttgcatctgtcaggcatgggacgcaccgaaaccggacggcctacgactcggtgagtgttttgcgcagttgggccagaccgcgcgagacggctttccgcaccgcatcggcactggtcggctggcctgcgccggtcttgtcggcggcgatctcggtgaaccggtcgccgtggagcacatgcagctcgatgtactcgcgctgcgtcgcagtcagcggactcagcagttcgaccaccgcgaggttggcctcgacctgctcggtgaagtccggatcgtccgaggcgaagtaatccgcgcccagcccgccacgctcgtcgtcatcaccgtggccgggttggtcgacggagatgtcggagcggcggcgattgtccagctcgcggtactcggcgtacacgtcgtcgaggtaggcgcgagcccacttcggacgcgaagccgggtcgcgcagctgggcacgcagttcttcgctgtcgggcaggtcagggacgggtaggtcgatggtgttgcccctgggggtcaggtacgggacagtgaattgtctgttgaatgccacgtgagggcttcccttcttgcgaagggagaccccgttgagggcaaccgacgagagaccgtggtgttgagcggaaacagtgacgggcaccaacccgacccgggggtgaacccgggtacaggtggtgcccgtcaagcgctcaacggaggtctcccgaatacggttgaaaaacgcatgcgggtgtaggaggaaggcggccggccggtgaccggtacggctttgaccgccacagcggttgggctgtcctgccggatgacgtctggccagcaggacagccgtgagggctacttgcccttacgcggcttggcctgagccagcgccgaggctgcgaccgacttcgtcttggccgaggtgcgaccgtcgcgcagcagtgcggacgccttcttggcgaccggtcgagacgtctgcttcgtgtttcgtgtatccatgtccctgttcacctcctgcctcagctcgctccgacacggttacgcgttcatgaagatgaacgcgacaagagtgaagcggccttgtaagatcgaaggaacacaggttcgctgttcgcccttgtggttctaggttccccgatgacggttttctgatcggctgggaagcgatgggcagcgatgggtcgcgatggagaggcggtgcggtggattacaagtcgagcttccacgccgtcttggcgacggtgcgcccgctgatgaaaggcacccgtaaccttggcgagttcaccgcaggtctcatcgacatgggactcgtgcctcgcggaaccgtctacggcgagaagaccgcgcttgagatgcgcaagtcggcgacgtggaaggggtacgccaacgggtctgaccagctgcctactgtgttagcgagcgagctggctgggcgatgggatcagtttcggttcgccagcaacgtctcccaggcatacgaggagtcggcactcaatgacctagccgaccggctccacgaccttgacgagtcgatcaacaagggcaatgtcaccgaaggtctaggccagctgttctacaaggtgttcaccgaagctgccggtgagaccgctgccgtaacggagcccttgactttggcagacaaggccgaccgatctggcatcccgtacattgacgagaagacgaatcgcctcaggcttggcgaccgctcggtcgcgttaccgccgaagcatcccacaccggacacagttcagcctgctgagctggggtatgtttcggcgctcctggccgcgcattgcgaagacaaagcccgtaccggcgttgaggtgcagctggacgacatcccgtcgcgtctggttcaacacttccaagaacagcgcaaagcgttctaccgtgccgaatgggtacgagaaacatcgtggaactgcatccacgatgggcggccattgtttgacgagttcttggaaacgatgcacgcgggagtctccgacaccaacttgcgtcagtaccccaacggactcgaacgcctcctcgcgacactggctcaagcagccgcagtccaactcgacggtgtccggctcgaccagatcattgacctgatcgacgtgtggagccggaaaggttcctgccacgaactcgtcgcccggaaccggctgggatgggtagattgatgcgcgccacgtccctagacacaagtttcgaagctgaactgcgcgggctcatcttgctgttcctgctcggagatgcagcggatgccgactacctgggtgccctagacaccatcaccgtcaacgcccacaccttcggggtcggggcagagaacctcaacggcacccaccgactggccagcggggaactccacacgcgcacagtcctgatgacccaagctctccagcatttggcgatccaaggattcgtgacactacagccagatcgttctccggcggccttcacgattaccgctgagggtgaatcagtcgtcaaccatttccgctcccgatacgccggtcagttgttcgacaccgcgttggagacgatcgagcgggttggcgacctgagcacgagcgagctggctcagatcatcaggtcagcgaccccggaaggagaaacgcgatgacaccaggcttctggatcagcagcatcaccgtggccgggcaccccactcggcgggactccagcgtcggtttcgaatctggactcaacgtcatctacggaccgtctaactccggcaagtcctgggtgcttcagtgcatcgactacgtgttcgggctgaaagccgacgagttcgtcctcgacgaaaactccggctacaccgaggtgcgtatgggggtgcgcaccgcgcagggctcactcacgttatcgcgccccatcggtgagggagccaataacatcgaggtctccagcacagacccacgaattgagtctggaacctacaaacgtcaatcgtctggccgttccccgctactcagctcggtgtggctcaaactcatcggctacgacgcccctgaaaacctgaaaatcatcaagaatcaaaaccttgaaacccaggcgttgacgtggcgcaccttctggcatgcgctgtacgcggatgaagaccggatcagcaccaagaaaccaatccttctccctcttcagaccaccgcacagcccgcgttcaaatgcgccctagcgtcactgatcaccggcaaggactatgccgcctacgctcgtgatgagtctgtcgaaacgaggaaattgcgtaacaacgcgatcatcgactacctcgagccgctacccaaacagcttgaagaacgaatcgagttgatcgacaaagcactcggtagcagcgacccagcagagatccagcagcgcatcgatgagctgatcgcagaactggaacgtgtccagcaacgcatcacacacgccaccgtgcaggggcaagacgtcatcgcacgcctccaacaggtgcgtgactcgctggcggaatcccgcagtctgcggaaccgatacgaggaacttgccgcctcctaccgtgcccgcatcgagcggttcgatttcgtcgaggaaggccacgccctcaccgcacacagggaaccggcaacaacctgccccgtatgcacgcaggcactaccaccggaagcgcgatccgcagttccagagcccgatctgcgtgaacgccacgacctagctgcccgactcaacgatcttcgtcaaacgatccatcagatggatcttgaacaggcaccactgcaagaacaagagcaggatctcgccgcagaagccgagcgcatcgcccggcgcatcagcggcgagttagagccgcaactgcaagccctctcgacttcgcttgccagccacaacgcgatcatcgccatgcaggcagaaagagaacagcacctcgaacgcaaacaagccatcgaagacgaacttgaagaacgcaagaatcgcacattccccaagggcaacttcaatccgctcgacgaatacccgaaaacgttctggccgcagatgggcaccaacctgctcgacatccttggagcctgcgcgttccccagactcaaagatgcccgattctcgcgtgaactgttcgatgctgtcatcaacggcaaaaccaaagcggaggaagggcagggctaccggtcgttcgtcaacaccgctgtcatgctcgccctccgggaatacctcgcctccgaggacgccacacacaaccccggcctgctcatcatcgacaccccactactggggctcgacgatccacagctcgaccccgagcttcaagaagcccgtgaaaccatccccgctgccctctacgactacctcgccctcgaacaagacggcggtcagatgatcatcgctgacaacaccaagttcatgcccgacatagaaccactaaaggaccgatgcaaactcatcgtattcacgaaacgcgaaggagaaggacgctacggcttcctgctcgatgcccaggacgaagacctgatcgatctggaggaaacagatgacaactaaccgcgccttcagctacaagcccctctggaaactcctcatcgaccgcgacatgaacaaaatccaacttcaagaacgtgcaggcatcagtccagccaccctgtccaaactcggacgcggcggcaacgtcaccaccgacgtccttgcccgcatctgcgaagcactcgactgtgacatcgccgacatctgcgaggtcgtccccaccgacctgaagggagagaccgactagatgaccgctcaacgcctgcagctcacctggtacaacaaggacaaggctctcatccccactgagaccggcaagtacggctacacgtgggttgacccctctgatccgcgctactgcgaaacccacaccctcgtgctggacgactatgtgcaaggcagccagacaccgaagtctgacgagttcgcctactccgagcgcgctgacctggagccccaggatgacaacctgctgatcttgggtgaatcgggcgatgtcctcgaagccctcacccgcgtgcccgagcttgccgagaagtacgtcggcaaggtgaaactgatctacatcgatccgccgtttaacaccgcgcagacattcgcttcgtacgaggacaacctagagcactccatctggctgaccatgatgcgcgaccgactgcaccacatgaagaagctgcttgccgacgacggctccatctgggttcaccttgactacgcggagaaccaccgtatgcgactgctgctggatgaggtcttcggttgctcaaacttcattgccgagttcgtgtggcagaaagcagactcgccgcgaggtgacgctcaacgtgtttcggtggatcaagatgtgatcctttgctatgccgcgagtggaagcacagtcatgaatcgtatggaaaggactgccgcagataacgcccgcttcagtaatcctgacggcgactctaaaggtgtttggttcagtgataaccgctccgcgcccacaaacgttatgtcttggcagcaccctagcacctttgcaattcagcacccaatcagtggcgagatgatctacccggccaagggtggatgctggcgttttggtagagaacgtctccttgagtcattgaacgagtacgcggagtatgcaagcggtgatgtagacattgcggctcgggttgcaaacacatcgcttcggtcagatcaggttcgttcagacattcctgacctggtattggtcgaccccgcttcagcggctcaatgtgctcacacaagaattgatgatggaaattggccagaattcttcgtgactgcaaccagcttcggcagaaagtcctatcctcctaatgaaggtcagcctgcccgttcatggtggcctaatgatcaggtgggacacaatcgcgaagctaagtcagaaataaaggctctcttttccggtgcgacgcctttctctacccccaagcctgaacgtctcctcgaacgcatcattcatatcgggtcgaacccgggcgacattgtgctggatgtgttcgctgggtcggggacgacggcagccgtcgcgcagaagatggggcggcgttgggtgacgtgcgaattgctggagtcgacgttcacaacgtttacgcgtccccgtctggagaaggtgctcaacgatcaagacccgggcgggatcactcggactaagggcaaacgagtcgacgctacggaagacgggctgcctgatggtgtctcgccggaggacgccgcgaaattcacgagcgtgctcaacaagctgatcaaggacgacccggaattgaagaaaagcatcgaggtgaagacactgaaggctgcctcgaagaccagacgcacgaaggaagtagtgaactggcgtggtggcggcggcttccaggtcgcccatctgtcgcctgcgtgtttcgactacgcccctgaactggaccgggtgatgctaactgcggccgcgaccggacagactctgatcgagtcggtgactgccaacctcgggttcacactgttgcacccggatgatgactatatttttgatgcccgccgtggcaatgccttgttgaaggtggtggagggtgtggccacgaccgagatcgttgactggcttgcttcccaaatccagcccggcgagacaatcgtgctggccgccaccacggtgatggacggcgtgcgccagcatctgcgcaaactggtgaaggggtcgcgggtggtcgcattgcccgatgatgtgtttcggtacagcgaaggtggtgaccagtgatggcgaacaggctcaacatcagttttgactccgacatgctggagtcgatcagtgccgagttcgacctgcgtgctccgaacaaggaagcactgcgccagctggtcttcactctcgacggtgactatgacccgaccgtgatgcaggtgctcaacctcgctacgggcgtgggcaagacctacttgatggcggcgtttgtggagtatctgcgccgccaaggtgttggcaacgtggtgattgtgacgcctggtaagacggtgcaggccaagacggtgcagaacttcacgcctggttcgtcgcgctacattactggttcggcgcttccgccggaggtggtgactccgcaggattattcggcgtggatcgcgcgtcaaaacggcccggtgcaactcgcgttcgggcgagagactccgatgttggcattcattttcaatattcagcagttgattgcccctaagtctgatgagggtgacactttgggtggtacgcaggatgcgatgcggcgtaagcctcgccgtttcgatgagaacgccggggtgcttttcgattatttgaagggtcttgatgatctggtcgtgatcgctgacgagtcccacctgtacgggtcgagtgcggtggcgttcaatgcggctttaagagaactggatccggcggcggcgattgggcttactgcttcggtggataagaaaaccgatcacgtgatctatgagtatccgctgtatcgggcgatccaggacaaatacgtcaaagccccggtgttggctttccgtaagagtgggtatggcacggacgaggcctctgaggaacagcagttgcgggatgctttgcagctgcgggcgatcaaacaagcccactatgatgcttatgccgccagtgaaaaccgtgctcacgttaacgccgtggtgttcgtcgtgtgttcggacgtggaacacgctacccaagtagcggagcttttgcgtaccccggaatatctcgggcgtgacgaggcagtgttgcaggtggactccaaacatgaggacgagctgacgcagcgccgcttgaacgagctggacctgcccggctcgcccgtgttggcggtggtgagcgtgaacaagctcaaggaaggctgggatgtcaagaacatcgcggtcgtcgtgacgttgcgggcgatggcttctgaggtgctcactcagcagacgatggggcgcgggctgcggctgccgttcggccggtatacgggtgtgtggcagatcgaccagctcgacatcatcgcccaccaatccttcaccgagctgctcaacgccgagaacgtgctgcagcagttcggcctggacgaagccatcgccgagcccgacaaagccaaggtagaagaggcgatccgtaaagccgccgaagagtccggcacgggtacaggtacgcccacgaccggcggtgaccaaccaacgacgacaaccggttctgaaccgggcaccggtgtcagtggtgaggtcgccggtggtgtggctccgcagccgggcaccgttcccgtcggcggcagtgattccccgggtgcgggtttgcccggtatcggggttcgcaccatcaccgaacaggaggatcagcccacctgggagttggtttcgatcggacggaacccgagctttgctgacgtgtcctaccgattcccggtgacgacgatgactgtgcagcagccgcccattgacctgtcagaaatcagtgacgccgagattgagcaagcggcgcgtcgggtcacctctgctggggacgtgctgctgcgcaaagagatcatcgccgccctaggcaagaaactccgggcagaggatcgagaaagcgccgaagtcgactccgtccacgtcgacgacgccgacgccgaggaggcgctggtcaaactagtgatcaacatgtcgctggtgcccaaaaccgaacagaccgcccgctacgtcgccacgttcctggtgccgaagttcatgcgcaccgtgacgttcaccggctggaccgtcaaatccctcgactccgcccgcgccgaactcctagcgctgatcaagaactacacaaccgagacactgcgagccacccgcgaggtgccgaccatacaccccaagtcgatgccaggcaccggctacacgctcccgttgggtgagaaggtgcatgaccagatcgagagtcgtgaccagttcgtgcgaggccgggtctacggcggctggttcaagtcgctattcgccgaggagtccttcgactccttcaccggcgaataccagcttgctcgcctgctcaacacgtcgccggggatcgtgtggtggcatcgcctgcatccgcaagaccaggcattcgtgtactacaacgcgaaagaccgctacttccccgacttcgtagccttggacaccaacggggtgcattggatcatcgaaggcaaggacgagcgcggccgcgatgacgccagggtgcaggccaagcgtaaggctgccgaggcgttggtgcgccggttggtggctgaggatgcctacgccggtcagcactggggctatctgatcgcctacgagcaagacaccgcccgtgccgactcgtgggaagacctgaaagccttcgccagcccggtcagcaacgccctgtagctgcgagttcgcctgggcgcatcacggggctccagcgttgcgggaggtcgagggtgacggcctcgccggtgatgaacacgaatccgagcctgccatcggtgagcatgcagccgccctccagcatggcaaggaagtccgggatgtggagcgcaagctgggtcggcgattcggtcaggagcttgtcgatcgccgtgtggagcgtcgatgggcgtcgccgcgcacccgttgactgcaggctgtccacggcctggtcaaccgccgtgctgttgcgcccagcgagcacctgcaacgcctcggccatcttcaccagcagcacctcctggtagaggtggctggtggtgcaggtgccgcgcttgacgtagttcgtggggcactcccacacgtcgacccggttcggggtaccggagtgccaggtcttgtggccgaacggccgtccgcagtcgccgcagacgatcttgcgggacaggcgcttgccgaaggacttgtagccgcgtgggtcgacgcgggtgcccagccacggcaactcgcggtctgcaatgccgagagcctcggcggcgtggcgttgggcgtggaatgcgtccatccactcgacggtgtacccggcggcgagattttcgaggaggaagctggtcagccggtaggtcagtcgggcttgtactgttgcgagttcggggtattgcatggtgggggctcctgtctttgcgtcacgtacatacacgctctgatcagggctaatagcaagtcgtaaacggcgataccttttagcgcttgccgaactatttggcgctccgttgtcagcctcgacgcacgtggttcacgccgccccacagcgcctctcggacaagccagccaccggagccgatccgtccgaatatgcggctcgacggtcaacactaaggcgcgttttacctagtggggagcgggtttcgccccatctgcgtcatccgcgcaccacaaacccctgtatccacttcgatacagtctgc

SEQ ID NO: 71 - DNA, 7797 bp, Propionibacterium acnes
  source 1..7797: mol_type = genomic DNA
ggtggtgccgaagaagaaggaatggccccaccaatctgctggtcggtagaagtacggggtttgagccagtcgagtagtttcataatctgctccttgcaaggtattgtgaaggatatgaaatctcttacccctcatttgcttctctgctcttttttcacaagcattgctcctgccttaggagaaggatttcgcaacaaacgtgtggctttcattccgacagcagcagcccacgaggagtacacagcctacgtggattcagcacgctcatcatggaaagaacttggcagcaatatcaccgatgtggatattgccagaatgcctctaagaacagcgaccgaggcgcttgagcaagccgagataatctatctttcaggagggaactccttctacctcctcgattgcctacgctcaacagaaatcgaccagattattcgagggcgtctggccgaaggggcgattctagttggtgaatcagctggagctatagtttgtagcccaaatatcgcctacattcagccaatggatcgtgtccctgacaactacagccaggctgactacaccggactgaacttagtggacttcttcccggtacctcactacctcgcccctccatttgtgaagagttccaaggaagtagtcgcccagcacgctagcctcccactcgagctcatgaacaacgcagaagcggtaatagtagagggtccccaaaggacaaagatctcatcagagcaccagtagtcctcgtgagtcgtacaccgacgtgcccgtgtggctgccaccgcctcggatagcgcggtcgagggccatgatggtggcgaccacctcgtcgatcttctcggtggacttttgcttgtcgggtttgatgtttcctgccgggtcggtgcggacgtgaatgttgtcgaccatccaggacagcactgggtgcctgccgtgagcgagcctaccttctagtgcgagtctcatgagctccttggacggtgggctcatgtctttgaagccttgcccgaagggcacgacggtgaacccggcatcgtcaaggttttggctcatctggactgcgccccacctgtcgaaggcgatctcgcggatatcgaagcgtgtcccgagttgctcgatgtggcgttcgacgtgggcgtattggacgacgttgccctccgtggtctctaataagccctgttggtgccacaggtcgtagggcacatgataacgcgccacccgcaacgccaggttgtcctccggtatccagaaccacggggcgatccggtacttcttcgtccccgtagggtgggaagatgaggacgaaggcggtaatatccgtcgtagaggcaagatccagcccgccgtagcagcgtcttccttccagctcgtccaggtttaccgggtcggctcccgcgtcccagatgtgcatgggcatccaccgcaccgactgcttgacccactggttcaacctgagctgccggaacgtgttctcctcggcagggttctgccgggccgagttgcacgccgcgcgcaccttgtcgatcggcaccgtcacgcccagtgaggggttggctttgcgccacacggcctcatcggtccaatcatcatccgcgtcggccccgtagatcaccgcatagaacgtcggatcatacttcttgcccgcgaggatgtcctggactttctggtgctgctcatagcaaatcgaatgcgtatcagttccggcggtggtgatcaggaaatacagcggctaggtgcgtgcgtcgcccgaacccttggtcatgacgtcgaacagggctcggttgggttgggtgtgaagctcgtcgaagaccacgccggagatgtcgaacccgtgcttgaagtaggcctctgcggagaggacttggtagaaggagttggtgggcttgtagatgattcgcttctgcgaagagaggatcttcacccgcttcgacagggctggtgattggcgcaccatatcggcggcgacttcgaacacgatcgaggcctgccgccggtcggccgcacacccgtagacttcggcacgctcctcaccatccccacacgtcagcagcagggcgacggcggcggcaagctctgatttgccctgcttcttggggatctcgacataggcggtagtgaactggcggtagccgtcggctttgacggtgccgaacaggtcacggatgatttgttcctgccagtcgatgagctggaagggctgtcctgaccagcggcccttggtgtgtttcaaggcttggatgaacgcgaccgcgaagtcggctttccgcttgtcataggtggagcctgcggccatgaaccgggtcggcgtgtaggtgtcgagagtgcgcatcacgcccgtcaggctccttcctgtgctggttagttggtgtgggcgaaggcccaggcgatggcgtggccggcgtcagcgaacagttcgtcagcctcggcgaccaggtcgagttcgcattcactgaagcctcgggcgtcctgtccccagccggagatcggctgctcggcgagcttgtagacgcgggcgtcgtttccgatccggcctttgcccaagtgccggtaggccgaggcgaggacgaagtccccgtaggcgatcaccgtgccgtagctgtcggtcgccatctgcagctgctccatcgtggtcttttcgttgttcatgaccttctccttcttgccttgttcggtcatgtacatacagccataggtgcgcgctcttatccagtcgtaaaagccctagtcagcccactatttttgaggaatctttgaggggcgacgggcacggaaacggcccctgattgggtgggtacccacggtggcttggggtcagtcgatggccaggtgccaggcggggatcatgcggcgttccccggtgatcgggtctgggtagcggtcgttgacttgggtcatgcctcgcagggttgcccctgcctgggtgaggttccagatgatcgtggtcaggccggtctggttcgcgctgatcgtgaactcgccgatgctgtgctccttgagttcgtcgaggatgctgggcacgtctgagtcgtagagaccttcggcgaagtcgagcagctcgttgcccgcccgctggctgttcatgtagacggtgagcaggctcgtggacgaggtttgggtgcgggtcgcgatcttgctggtcgaggtcgtcaattgtgttcatcgcgggtgtccttgtgggtgggtggggtgcgccaggcggcgttgccgtccaagtgtttgagcaaggtgcggcggacgggtttggtgtcgtcgccgatcagaccgaggcgcagcagccagcagcgcatcgcatatttgtcgttcccgcccgtttcggcaggtttggctgaggctcttgtggcggttttggcgtggtcgatgatccgggcgatcagcaccgtggtggcctccactacctgcgggtcgggcgctacgtcgaaccaggggaactcgaccgtcccggcctcggcgtcgatgctcatcggggttgcggggatctggagtgctttggcgatgagctctcctttcgctgctagcgtcgcctccaccttccctttcgtggtgtcctcccaaccggtggtggggaacgccaacgtcaaccccaactcgcctggctcgtcggtggtgtccgtcgggaatccggcctgcgcggccgcctcgaccagcccggccacgtcggtgtcctcgggcagatgcagcagccagtcacgatccaacatggcctcgccaatctggtaggcaaacgttggggttcccagatactcgacggtcgctcgcagctgggtggcgagaaaagcggcgagttgcttgcggcctttgcgctgcttggtgaacttgagtgtcgtcatgaccggcctcctttgcgtgttcccctggtcggagtggttttcggtcatgtacatacacgctctatcccgaccagatagcaagtccggacggccacctatttcttgcctcgatccacggccttcaccacatccaggtaggccaactgttggccgtcgcgcaggcaggtgatacctgcggcgtccccggtggcgtcggcgtagcggcgcagaatgactgaggcgtatttctcgtcgagctccatgcagtaagcgatccggttggtggcctcacacgccatgagcgtggagccagagccggcgaacgtgtcgagcacgatcgcattcgcctgggtggagtttccaatcggatacgccaacagatccagcggcttcgaggtcggatgatcagcattcctgcgaggcttatcaaaccgccagacggtggtttgtttccgatccgcgtaccacgtgtgcttgcccgtcttcacccagccgtagagaacgggctcgtgttgccactgatacggggaacgacccagcaccagggagtccttgacccagatgcaacaccccgacagcttgaagcccgcgtcttgaaaggcgcgccggaagttcagaccttcggtatcggcgtggaacacgtacgcggacgcgcccttctcacacacgcccgccatctgagtgaacgctgcgagcaggaactcgtagaacgcgtccgcgctcatcttgtcgttcttgatcgacaagccgtcagacgattcgaaggcgacgttgtatggcgggtccgtgagcaccaagttggccttcttgccatccatcaacagctcgatgtcgcccgcgttggtggcgtcgccgcacaccagccgatgcctacccaccgtccagatatcaccccgctcgacgaacgcggcagcctccagggcggcggtcagatcgaagtcgtcatcctccacctcgtcctcatccaaggagccgatgagctgggcaatctcatcgtcgtcgaacccagtcagctcagcgtcgaaatcactcgcgtccaggtcggcgatgagcagggcgagcttgtcctggtcccagtcgccactgatcttgttgagcgcgacgttcaaggctttttcgcgggtctcgtccaactcgacgaccacgcagtcgacagtggtttcaccgaggtcttcgaggactttgaggcgctggtggccgccgacgacatggccggtggtcttgttccagatgacaggttcgacgtatccgaactccgtcagcgaccgcttgagcttttcgtagtcggggtcgccgggccggaggtctttgcgcgggttgtagtcggctggcgtgaggtcagcgatgggtagctgctcgatgcgcacggggctccaccgccttccgcaggtcgcgctcaaaacgccaggtttgttcccagcgcggccaatcccggcccatgtgcccgtagaccgcgagatcccggtaacggggtgtgcgcaggttgaggacgtcgatgatccccgccggccgcagcacgaacacgtcacgtgcggcggcggtcaagatgtggtcggcgtactcgccggtgccgagcgtgtccacctcgaacgcgaccggatcagccttcccaatcgcatacgagatgcccacctcgcactcagcggccagcccggcgtcaacgatcgtacgagcgatcaggcgagccatgtaggccgctgaccggtcgaccttggatgggtccttgccggagaacgcgcccccaccatgagacccgagcccgccgtaggtgccgaccatgagcttccggcccgtcagcccggtatcggctcgcggcccgccctcaacgaaccgacccgacggattcacaagaatttcggtgtgctcgtctatgggtaggtaggtctggcaggccggggccacaatcagcgagcgcacctcacgctccaacacggccagatccttgcccgcctcatgctgcaccgagaccacgacggtctcgacggcggcgggggcaccggtgtcgtcataacgcacactcacctgggccttgccgtccgacttgatcccgcagatcgtcccctcgacctgggcagtatcgagacgctcgcagatgcgatgtgccaggacgagcgggagcgggaggcgttcaggggtctcggcggtggcgtaaccgtagaccgtgccctgatcgccagccccctgcaacgcgaacgccgaactatcaccaccgcgtgcctccagcgaggtggtgaccccggcgttgatgtcgctcgattggcggcgcgtccacacgtagatcaggatcccgagcggactgtatccggcacgcgcgagggcggtgcgcacagactcccggatacgcgggcggtggttggtggtgatttcgccggtgacgatgatccgccgaccggctgccatcacctccaccgccacccgtgcggccttgtcgtcgtagaggatgtcgtcgaggatctggtcggcgatctgatcggccaacttgtccggatgaccagcacacacagactcggcagtacgaatcgaacacataagcacactcgcttccacgaatcggaggggaacaagaaagcgtccaccccactagagggtggacgcgaagatcatgaggggcggttaggagcgggcgttgagcagctgctccatcacctcgtcgccgggcgtggtgcccgcgtagtcggtggtgcaggtggcgcgcacgatctcgtaaatctcgtaccaatacacattcgcctgcttcccgaaactctgggacatggcgacaaacgggctggcgatggcggcaccggtggtggggtgcttgccgagcaggccgaacttggagatcgcctgctcgcactgcacataccgggcaaacgcctgcgcatacgcctcaatcaggcgaggcgccacgaattgggaaccgccacgttgatcgagccactgccacgtctcccgatagacgaggtcagcgccaagcggtttgccgtcacgctgaatctccgacagatagtccgatggttcgggcatcgtctccccggcaagcaccgcaccgtcgccaatgtcattacctgcgaagtcgaagggttcgttgagcgggtcttccaggcgggtggcggggcgtccggcggcgagtttctcgcccagcgggccgggcttcgcgcctgcacgcacgcggcgtccgcccctgttggtgccgtctttggccatgggtcgcctccccgccgtagaatcgtcatggtttcggtgctgaagtccacgggaggtgtgagtggttgagtctttaaaactattcgttcggacctacgtgtattgggtagggctcatccttggcttcgcgatagtgcccggttctctgctcttcactgctgaagtcgccccggtgaacactccattgtggcttgcacctttcgccgggctgctgctttttgtcattgatcggccatcaacatgggagccgccgctctggcgagcattactgatccgagtattgggtgcaggatttgcagccaccatgctcatcgcgtttgatgcagttgcttccacccactatggatctcaacactggagtgagacgctcctatctttcggtctcggttggattgtcttcacggtagtggcaggacacatgctcatgagcagctccgcccgatttggcacacctgctcacacgatcagggacgcgatccgtacctacacgacatggataggaatctgcttcgggattttctatatccccgccgcgggactctccgcagctggcactcttttgatggttcttccgctttatggaacgttcctcgccggcctggttcttttgatagttgacccgccacgacgatggccgcaaccgcgagtgaaggcactgtggatacgactcttgtcaagcgtggcagcagcattactacttgttgtcacgaactcgttctatcgcagtactcgcacacacgagattttcgtcggggactggcaggaaaacctggtcttcttcgtgggtgcttgggcactttatgccgca

SEQ ID NO: 72 - DNA, 18956 bp, Propionibacterium acnes
  source 1..18956: mol_type = genomic DNA
catcatgccgacgtcaaggatcggcgcggccatccaccgggggacacgctgaggctcgggtgatgagggtcgtaggaatctcgactgttccactgggatccgttccaagggcaagacgggccgcagtttctcccacggcggcgaaatcaagccgcaccgtcgtgagcgctggccgagtggccaccgaatggggatgatcatccatgccgacgaccgagacatcctcgggaactctcaaccccaacctgtcaagccctgttaagaggccgagagccacatcgtcgtttccacataggactgcggtcacctggtgcgctcgtaccgcccgtgcaacgtgcatacccgtctcgactgaccacccagtcgccaatggttcgagcggcgggagacctcgagtagccaggacttcgcgccatcccgcacatcgtggatcagggtgccctgcaggaggaactccgacataggcgatgcggcggtggcccaaacccgccaagtattcggtggccattactgcaccggcatgatcatcgatccacgcccgagaccagggctcgcctccctcgggtttgcctccggcaatggcaactgggagatcgacgggcaacccaggcaggagggccacgctgggggaatcaaattcaaggacgacaaccccgtcggcacgagcgtctaaggcacattgcacggtggaacggcatcgctccggcgaccccgccaatacatgtagggaggtctcggcaccgaggtcgagggctgcgctgagtacccccgagagcgtcgcccagtagccggtgcggccgatgtcggagacgagaacgtgcagccgggcgacgtcagggtcggtgcgccaatatcccagctcggtggccgcggtgaggatctcctcggtggcctgcgggagggcaccttcagcgccattctgacgtgccaaggcacgcgacgccgttgccaacgagacgccggagcgctcggcgacgtcagccaaccgcggaggccaccagggccgcctcaccatggccgggtcacgttccatgcaccggacgataccgggttcacacccctgtcctcggcaagggcgtccgcggaagaccagggcgcgacggggccgcatccgcggctgctgaggtggagcgagccggggtggacggaacgggaatcgacgtcgccgatgggccgggaagaggcgaggggatcgtcgtggtgagcgtccagaccgctgccgtggccaaatccgagccctcgaccacccggctgtcagctacgacgatcggcaggccggtgaactttgagtgcagggtacgccccgccccgtttgcaagcaggtgccagcggttgaggctgccctcagtatccgacgtcgtccgacgaccggacccgacgacgacctcgtgcttcccaacctcggcgtcgagaccaaggaccgcgccgccaggagtcgaaaggctgtaagtgcaatcgtcgtgccgaaccacacaccaagtctgaggctgcgcctgcagggtagggacaccgtcgtgaaatgccaagaatcgcccgtccgcgctagtcagccggtagtcgccgggctccagtgccgggttgggggcgtaccaagcgcgcacgtagtcgatgtcaaaactcgccgggagtcgatggacgactggggcccccaggtgtccctcaagactgagcaccatatgccgcgacatccgccacagcgaagggtcgccgggttttgtttcccaggccaggtgtcggtcgaaataaaatcggagttgaccgtcgcggcgttcgacgccatacgtgtggtagtcccgcgaaatgtcgacgccaaccgggtaggcgtggcctccgaagcgccggtgcgtgacctctgtgttatcgggccacacgtgggtcgcgatgttcatcttcgtgtagtcaaaagtctcctcgacgtcaagctccgggtttggctcggcgccggtaagcaaggaagggccaccgtcgagggcggacgactgcatccagatggccgacagcacccgggcggccgagggcaacgccttggcacgcacctcgacgtaggtgcacagacccggcacgtcaaagactgactcaacggcgccaaacgtgtaggaaaaactatcgacctgctcggcacgagcagccaaatggagttgcccgcctgagaaagacacattcgcgtctcgaaagaggccacttcccgagtgtgggtaccacaggccgcgatgccactgggccgagctgtgagtcggatcggtgaattcgtctccaacacccaggagggtccagccagcaaggtcgatatcggcatcggcggcgatagcccgatcgtggtcggcaaccaccggaacggccgccgtgagaacggcagctccgaggactgatctacgtgtgatcagtgtcatgtgtgctcctttgcaacaacgtcactccctaactggggttccatgcagcctacgacgaatgactgcggtcaccacgagcgcgtgaaaacggcctttcatgcgctgtggacggcccctttcccggcacctagggtgaacgacatcacgaacgacggccaatgtcggccagccaggagttcaccaccatgcacgatgtcacccctgtcatccagccgtttcggctcgcgacggcccccgaccaaccggtcggcttggcagccgggactcttgacggcgcggtggcgcttcccctcgtcgaatgcctcaccctcgaacacggccgatgcttcgtcgaccatcgcctcacccaaactacggtgggatccggtctgcgtcccgttcgccgcgaaccgctcacctcgccgtggcccggcacccgcgtcatccagcatgatcgaggatccgacctcaccgtcaccgtcgatctgtggcatcccacctcagcgacaccttgcacgggcgaacaaccgtacataatgacggcaagctcccagtccatctcactgccgtctctatcatgtgcgccagtctgctgtcaggagccgaactcgatgacctcgatatactcatcgcacccagcgcatggatggccgaacaacggtggacccatcaccgcctgtccgatcttctggtggacgtcggcaccgaattgcatggagaatccccgcgcgaccgcttcgtcctatcctcagagtccggttggtcttcaggacgttgggaaccggtcggcttcattaccgacccggcctctggacgcgccgtcggctggcagatcgagcacaacggtggctggactgtcgaattagcccggcgctcttcaaccctcggcctctgcctcttcgggccgaccgaccttcagcaccactggatgcaccagctcaaccctggcgagactttcactacccccgcggtgacgttagtggtatccgataacagctggcagggcgcggcagccgaactaagcacctaccgccgtgtattgaggggcaacaatggcacagcagctccgatcgtcttcaacgactacatgaacaccctcatggccgaccctacggccgagcgactctcgaccctcatcccggccgcagctcgcaccggagccgaggtgtactgcatcgacgccggatggcactccgacgacacagactggtgggacgacgtcggccgctgggagccctcgccccgccgatttcccggcgggctgcgccacacccttgatctcatcgtcgcctacggcatgacgcccggcctgtggattgagccgctggcggttggtctgcgcagtcctctcgtcaatgatctacccccggaggctttcatgcgccgcgcaggggttccgatcgtcgaacagaatcgggtgcgtctagatatgcgcaatccgcaagctcgcgctcatctagataccgtcatcgaccggatggtcagttacggcatcggctacctcaaaattgatgacaatttctctgtcggttctggccccgacgaggacgcggattctcctggggacggtttgctggggcactgccgcgcttgggccgcctggcttgccgacctccctcgacgtcaccctggacttgtcgttgagaactgtgcatctgggggcatgaccaccgactacgccctgttggcccgagcagccatccagtcgacatcagacctccaggattcggtgcgttacccgcccatcgccgccaattcaccgatgacgattttgcccgaacaagccgccaattgggcttacccacagccagacatggacgacgaggaaatcgtctttaccgtcacgacctccttggccggcaccttttacttgtccggtcatgtcgaccgcatgaacgcccaccagatggctctcgtgcaatccggcgcagaggtagccaaggccttacggtcagatctgaccagccaaataccgtggtggccgaaaggccttgccggctgggacgacgagtgggtcgtcaccgggcgtcgaaaaaagtcctctcgcgacggggtgatcattgtctggcaccgtcctagcaccgaatcgacggttctcgacttacctgacctggctgggacccacctcgaacccctttacccacctgcctccctggtccccgacccaggaattcacattgctgactcatcgggttcacctcggctgagttgtccgtctcccaaaccaaccggccgggtcttccgcgtccgggaccttcacgattgcgtcaccgatgtcgcagaaatggagaagaaatgaatcgcaccctcaaggtcgccgcagtaggagccatcgcgatattgtgcctcgctgcctgctccgacccaggctcagactcggcgcaatcctcaggaccggagtcatggccgtcagcaaccaccaatctcaacggtgtggagttgacaatgtgggccgcccagtcgtcggcgtcgatccctcaacaggtcgccgtggacttcaacaaggctaccggggccaagatcaagatcgtcacgatccccgacccctacgagcagagcgtccagaccaaagtcgccaccggtgacgtccctgacctggccatgtggcagccaacgacgtcaatgctcacgagcctgggagccaaagagcatctgcaggtgctcgacgatgccccgtgggagtcgaagactgacaagaacgtcctggctgccggtggttctctcgacgggcaccgctacgccgccttcgtctcagccccctcggtcatgggcgtttggtacaacaaagaagttttcgccaagaacggcatccaggtgccgaagaatttcgacgagatgctcaccattgccaagaagctcaaggctgccggccagaccccgttctacgagatgggcggagagtggtgggcctcccagtgggcggtccaggtgcaggtggccgacgccgccaaggccggtctgtgggacaaggtcaacaagaacgaggacaagttcaccggcactgagatccaaggtgctatcaacacctacgacaccatgatcaaggaaggtctgttcaattcggacatcacaaccggaactttcaacgaccaagccaaggcgctgcttgacgggaaagcagcgatggccattcaagtaacgagcctattgggcaacatggccgcccgagccgacaccgccactctcgacaagaagatcgggttcttccccatctctaagtcgggcaccgtggcaacgtcgatccccgaccagaccaacgccgtggtcgccttcaaatcgaaggatgccaagaaggagactgcgacacgtcagttcatcacctactggttgtccaacgactacgcgtccttcgtcaaggtacaaaacaccgtttccatcattaacggtgttaaaacgcccgattccgtgcccaaagccctcatcgactcgaacgccaccctcaaaggttcggtcggctcgatgcagtctctggctgtcgccaaccccgacttagctaagaacctcggtgacatgatcgctggcacgaagactccagcacaggtgggctcagagactcagtctcagttcgcccagctcgccaaggcgattggcgcgaaagggttctgatccatatgtcctcgatggaagccgcaccgcgacacggcagtgcaaaccagtcgcatccctggggattcgttgtacccgcgttcgccgtgctcgcggtgttcttcctcacgccaacgatctacaacttcatctacgccttcaccgactggtcgagcttcaaaacggccatcaatccggtgggatggagcaatttctccgatctcatcgcatcaggaagcctgcggaaatccttgactatcacccttatttacgcggctggcgtggccacgctgcagaatctgttcggactgatgctggccgtactgttggagcgcgacaccctcgtcaacaagatcgtccgggtgatcttttttatccctgtgatcctctcggcgctagcgactggttacatcttccaagcgttgctgcgccccgacggcgggctcaaccaaatgctcggaatattcacgggatctccggtaaaagtctcctggctgggatcgacgacgtggactctgctcgtgtgcattgtcattcactcgtggaagtggatgggcatgtcgatgctcgtgtacctggccgggcttaagacgatcgatgcccaagtgctcgaggcggcacgcatcgacggggcgtcacggtgggcgaccttccaccagatccgcttgcctctcatcgccccagcggtgacgttcaacgtcgccaccgccttgctggggtcgatgaactccttcgatatcgtccaggcgactacgggcggaggccccggcggctccaccgaactgcttaacctcttcatcttccgaactttcggccagggcctctacgctcaggcgacgacgatgagcctggtgctcttcgtggccgtcgtcatcttggcattccccgtgatcgggatgcttcgtcgccgtgagggaaggatgtcatgaccaaacgcatcattcagccaattggcgcggtactgctagccgtgctcgtcgtcgggatacccctgtggacggtcgtcgtcactgcagggaagtcccaggccgaagcactcatcccggacatatcattgccacaccactggcaactgtggaccaacgtctccactgtcaccagccagacaaggatcggctgggcatatctgggctcgttgttcctgctggtgccctcggtggtcatcgtcttgatcatcggatcgatggcatcgtgggttttagctcggcgcacaggcaagctcgtctccgtgatctacgcgctggggatttcgggcatcatcctgccgccagcggtcgtcaccttggtgttactgctgcgtcagctgggattggctggccgccccatcggaatgatctgcgcctatgtcgggatgtacctgtcgacggtgattttcttcgtcactggattcgtccgcacgatacccgagtccctcgaggaggcggcccgaatcgatggagctggaccaatgcgcgtctttgtgacggtcatcctccccttgctgcgtccagtgctggcaactgcgacgattctcatcagcctgtacgtgtggaacgacgtcttctatgccttcttcgtcgtaggaggccggatggacaccttgccgctgaacttgtttacagtcgccagcgccggggtacacctcaataactggcatctcatcttcacctatgtgctgctcatgagcgtgccgatcgtgatgctgttcattgcattccagcgcagcattatttcaggcattacttcgggtgcggtcaagtaacccttcttactgcctggggccttcgatcggactggcgaaatctccacaacgctcaactggtagtgacagtgaggtctggatcctgcatgtcttcgtcgaaggggaagatcggacgacgcagatggttatggcccagacgcataaggtcctggtccacaccgccaggggtgagcgccatgatccaatcggcggccaagtcgtaaaggtccggctcgagatacccgatcttcaccacgactatgtcggtcgtccgagggtccagttgtacccgctcaaactgttccagggtcgtgtactgatcgcgccgagtcgtcacgatgacgctaagccccccgattcccagcactgccgtacgcaggccgccaggatcgtcaactaggcagcgcacctgggcactcaggtggatagggccaggcttgcgagtatcgacatgtccccctaaatccacctcaaccatgcccccgacgcccgcttcgtcagcacgtttcacgacctgtgggtcatagatggaagcatgaatcgcggagagctccccaccagtgatctcgggatgggccagcaatacagatagcgcaatcgtcacgtcatcagcaccgccagcgcccggattgtcccccgagtcggaaataacgaacggccgtcgcgaggacgccaccgccctgtctaccgcttgttcgatcccatcggtgggagcgacgaagacgaattcgcgacgcaccttccagaagaactgtgcaatctcgctcaccccgtcgcgtacgtggttctcgtcgtcaccgaacccgacgacggctgccgtgcatcgaggctggtcggcccaagcaaagccgatccacaccccaacatcggtaacaccgtcgtgagccgccacctcgggcaccatgtcgtagagcgaagccgccggttcgatcctggtggacgtcttttcaccgggtaacagaatcggcacggtgaccatcgccttgatcggtttgcccttcccggaacgcagtcgctcgcacaatgtccgagccgctctctcccgtgacacccacgcgtcctcgtgcggtgccatccgatagcaggtgagcaggtcgcagcccgcgaagagtttttcagagacgtttccgtgcaggtccatcgaggcactcaccattggctcgggaccaaccacgtcgcggatggcgctgatgagatctccctcaacgtcgtcgtagcccggcacgctcatggctccgtgaatgtcgaagaagatcccgtccacatgaccggccttcgccaggccgtcgcagatttcggcgcgccacttctcgtaggtcagacgttccacgggtcctcccggcagggctgagcagtgcaggatcggtacccactcaacgtcatggttccacggacgttttgtcggcacatcccactcctcgcctgcgatggcccggggcacctggtctatgccggggatcggggactcggtgatccacgggtatcgctccagcagtgtctggccgcgacgctgcgtgaagtcagcggccgtgctcatgtagggggtgaaagtactcgattcaatatgaagtccacaaatggctatacgtatcatcagcgattgccttcctgtgagatgggcatatgagagtcaagtatcgacatgccgatgagcggggcatcggctccgcaagcagaggtctcgatcacgagatcctcggtgcacatgggcaaacagcgctcgtacagttcactgcgtacgccagcgagcaaagaacccatctgcgacattgagccgcccaacacgatgcgaaccgggttgaggaagttaacaaggttggaaagcacctcaccaagacgcattccggcgtcacgcactaaggaaaccgcctggggatcgccgctgttctcggcagtcaccaactgtgaggttgtggaaatggacgagcccaaacggcccagctgccgtaggatcgcagcccccgatgccaccgtctccaaacacccggagttaccacaggtacacggtagggggttatcggtatgcacccgcagatgggtgatgtcgccagcaagaccgcgtgagcctcggtaagcgaccccgccgctgacccaaccagcacctatgccggtgccagctttaacgtagatgcaggagtcccggtgccgtccgcggcagttccactccccgattgtcgcggcacgagcgtcattctcgataactgatggcaccgcgagttcctgtgccaacatgccggcgatgtctttgccactccacccaggcatccgcgctgccccaacgacgtgaccactaccgtccaccgggccgggtaccgccaagccggctgaaaccaccgctccagggatctcgtcaccaagcttgtgccaccccttggccaaggctttgatcgtcttctccggaccgatctctatgtttatcttgatgtcgtcggtagcgagtagctcgccctcccgagacgctattgccaaccgggcatgatgctggccaagttctgcaacaaaggcattgccgactgctggtgcaacgcgcaatttagtgggacgacgaccaccggtggaatctgcgcacgcgtactcttcaacgactcgcgactcgagcaggtgtcgcaccgccgcgctcaccgtggaacgtggcatggaagtgctctcggcgatctcggcgcgagtcatacccggcgtttttcgaagaatcttgatgactcgctgcccaggcgcgctgcccagctgatcgtcagtgtgcccattcatgcccgtcgcgccaaggttggtgagctcaatatctgtcatcagcttcctcaatccgtcatcgtgcctgcccgacgtctcggcccacagtatgcccgcgtccggagatatgtgtagcaaaagtgataaaagctagattattttacattcgaagcatccgaagtcatcaccttgcgctactcttacggtagtaagggttcatcccaccaggcaacggaggctgagggaactcatgaagaaaccacgaaagagactgcttgtggtgaccgcagcagtggcagcaactctgttggttgcctcgtgctcgtatggcagtggcgaccccagtcgatctcaggcaagcggcggcgcgcaggacggcaacgtatccttcgcgaccaccacgcccaactggatcctcccggtgtccgcacccggaaagacgcagggtgagaacgccatgttcacccagctcatttaccccgccttgttctcctacaagctcgacgcgaagaacgagttcaacattgatgaacgccactcggtggccaaacctcccaccgtgtccgacgactcactcacctacaccatcacccttaaggaccgcacatggagcgacggcgtcaagctcactacgcgcgacatggagttctggtggaacatcgtcaccaacaacaccgacaagtgggcgtcctaccgcaaaggccagttccccgacaacgtcaaggctttcaagatcattgacgacaaggccttcaccatcaccacgactgagaagtacaacccggcatggttcatcaacaaccaactgaaccgccttgtgccaatgccagcccacgcctggtctaagaccagcgactccgacaagcccggtgagaaggaccgcacccctgccggagccaaggcaatcttcaaatacttgagcgccgcctcggaggacttacagaactacgacaccaacaaactctggaagacgactctcgggcccttccagctcggcaagtacaccccgaacggtaaggccaagctcgtcgccagtcctagctacgacggtgaagacaaggcgagcatttcgagcttcaccatgcagccgtacaccagtgacgacgctgagttcaacatcctgcgctccggaagcatcgactacggcttcatcccacccaactcgatgacccagcaaaagtacatcgagaaacagggctacaccgtcaaaccgtggtacggctggtcgatcacctacatgccgtttaacttcaacaacccgaagtccggcccgatattcgcccaaaaatatatccgtcaggcgatgcaacacctcattgatcaggaaggaatctccaagatcatctggaaccggactgcatcccccacctgcggcccggtaccccagcaacctggcaccgccggtagctccaaaggttgcgcctacgactacaaccctgcgaaagctgagaaactcctcaaagaccacggttggaatgtcactaaggacggaatcaccacctgtcaacaagccggggagggcgaaggccaatgcggcaaaggaatcaagcagggggccaagctttccttcaccgtgatctcccaatccggtttcacctcgaccacccacatgttcgccgaactcaagtcgagtttttccaacgtcggtatcaacttggagattcgagaggttcctgactcggtggctgagtcccaagcctgtaagcccaacgacacgaactgcaagtgggacctgtcattctttggttcgcagtcatcgtggtactacccggtctacgcgtccggtgagcggctcttccaaagcggtggcccggtaaacctgggcagctactccgacaagaaagccgacgagcttattgacgcgtccatgcgttcgaacgatcggacagccctcaaaacgtacaacgcctatctggctgaagacctgccggtgttatggatgccgaacccggtcaatcgcgtctcagcatggaaatccaacatccaaggaatcgatccacaggaccccatgctgtacctgtacccgcaggactggaccatcagatgacctcacgcagagtgagcccacgttactgaccccgcccgtttcacacggcgtcaccgggtcgccccggtgacgccaccccaacgtcccaatcacccatctcaggagggagcaaaggatgacgcgatacatcgcgcaacgcgtttttcaagcgctgatagtgctgttgctcgtcacgcttatcactttctccatccttcacgcacttccaggcggagcagctcgctcggctttgggactggacgccacccaagcgcagatcgacgcatacaaccatcagatgggttacgaccaacccttatggaagcagtacttcggctatctgatccagatcttccatggcgaattcggacactctttccgactcaacatgccggttgccgacgcgatcggtcagcggcttcctaagacgattgtcctcagtctcatgtcggcagtcgtcgccatcctcctcgcgatccctatcggcgctatccaagccgtcaagcgcaaccgcacggctgactacactctcaccgtcatcgccatgctggcatattccacaccattgttcttcctgggcctcgttctcatcatcctcttctcacaggtgtggccgatcttcccaccagaagcgccacaagggttcagcgtcggagaagttcttagccaagggcgatcgctcgtgctgcccaccacgacgctcgccatcgtcacgctggccgtgtacgcgcgctacatgcgttcctcgatgattgacaacctcgaggaaaactacatccgcaccgcccgcagtaagggaatcaccgagacaagagtcgtcatcgttcatgccctgcgcaactcgctgtttccgatcatcaccctactcggcatgcagttgccggccttgttctccggtgcgctggtagtggagtcgctgttcaactaccccggcatgggtctgttgttctggcaggcggcccagttccgcgactaccccatcctgctagcagtcaccatcatcatctcaatggccaccgtgctcggcgccctcatcgcagacatcctctatgccgtcgtcgatccgcggattcgttacggaggagcagaccgatgagcaccgagatcgctattcccgatcctcagagccgacgtcccgaatctgcccgtcccatgcgtcccggcacagcgcgacggaccagcagacgcaccagcctcttcaaacagggggtggaggtgttcttcgagaaccgtttggccgtcgtaggatttgtcaccctgcttatcatcgtcgttctgtgcttcatcggaccgtcgatctggcgcaccgatcaggtccacacccagctgtccagcgcttacctccccatctccggcacgcaccctcttggtacggacgcggtgggctacgaccagctcggacgactcatgctcggcggccagacatccatcatcgtcggcctggcagctggcatcctggccaccaccatcggaacgatttggggcgccacagccggattcgtcggaggatggttagacgctgcgatgatgcgaatcgttgactcactcatggctatcccggccttgttcctcttcatgctcatcgccacgctcgtcacaccgaccgtgcccttgttggtactcatcattggcgcatttgcttggctcaacccagctcggctcatccgcggtgagtcgctggctctgcgcagccgggaatacatcgtcgctatgcgtggcatgggcggtagctctctgcgcgccgtacgcactcacgttgtgcgtaatgccatcggcaccgtcatcgtcaatgcaaccttccaggtggcagacgccatcctctacgtcgcgtacctgtcatttctcggcctcggggttcccccaccagcggccaattggggcggcatgctttccgacgggctcgccgaggtctactcgggtcactggtggctgttatacccgcccggggtactcatcatcattctggttgtcgcgtttaacttcgtcggtgacggattacgggacgccttcgaggttcggctgaggagtagatgacatgagcatgtcacagcccgaagacatcttgctgcgtctgcaagatctggaggtcactattgacgtgcgcggtggcagggtcgcgcctttgcggggctgctccatggaagtacgacgcggcgagacgatcggtctagtcggcgagtccggatccggtaagacgatgacagcgctatccatcatgggcctgctcccccacggtggacgggttaccggaggatccatcgtcttcaacggcagggacctcactagttcgccacccgacgagacccggcgcattcgcggtatggacatcgggatgatcttccaagacccgctcacctcactcaacccgacgatgaaaatcggtaaccaagtaggcgaagcgctgagaatccacaaggtggcctcgaagaagaaggcttgggaacgctctatcgacctcctgcgcaaggtgggaatgccacgtccggaaaagatcgtcaatgactatccgcatcagctgtctggtggtatgcgtcagcgagtcatgatcgctatggcactcatctgctcacccagtcttctgatcgcggatgagccgacgacagctttggatgtaacgactcagcggcagatcctcgacctcattgacgacctcaagaaggagttcaacaccgccgtcatcctggtgacacacgatctgggagtagttgcgggccgggccgaccgggtagccgtcatgtatgcgggtcagatcgtcgaggtggcatcgtctaccgacattttcatcaacccccagcaccagtacacgcgctcgctcattgccgcactgcctgagcagaccaccgatacccgtgaggagctctacaccatccctgggatgccgccggacctgcgcgagaagatcgtcggctgcgccttcgctactcgttgcccgctggccactgagatctgcactcagtccaaccctcacatggtcaccctgggcagaaccgacgcgccaagtgccaacaacgaacccgccaaccatgtacatacctgcttccatccggcagggccgccgctgaagcgccgacacgacctacgcccggagcgagacctgtccagccaccccgttgtgtgctcagtgcaagatctccataaaaactaccctgccatgagcagcggcgtcatccggcgtcaaatcgggtgggtacgggccgtcagcggtgtcagctttgacgtctatgagggcgagacactggggatcgtcggtgaatccggttgtggtaaatcgaccttagggcgcgtcatcactgcgttggaaccagcgacctcaggctccgtgtgcatcaatggcaaggatattgctcaggcgtcacgcagggaacgcaccctcttgcaccgcaatgtacagatgatgtttcaggattcctacgccgcaatggatccgcgcatgcgagtagacgagatcctctccgagccccttagcatccaaaaaatcggagaccggcgttcgcgtgccgacgctgcggacaatctcatcgacaagatcgggctgtccgataacgccttgtcgaagtacccgcatcagttctctggtggccaattgcagcggatcggccttgcgcggtcactgatgctagaaccccatctcattgtctgtgatgagccagtcagtgccttggatgtatccgtccaggctcaagtgctcaatctcatgcgcaggctccagcaggagcagaacctcacctacatcttcatctcccacgacttgtctgtcgtcaggtacatgtcggatcgaattgccgtgatgtacttaggaaaaatcgtggaaataggtgaggctaacaaggtcgtcgaccacccacgtcacccgtatacgcgggcactgatcgaggcgatccccgttgctgaccccgcgcatcacgtggaggagatcgtgcgtctgcagggtgaaccagccagtgccatcgacacgcctccggggtgccgtttcaaaaatcgatgcccatttgccaccaacaagtgcgccgaagaacccccgttagtgggcgacactcaccgagtggcctgccacttccctctaccacacgacgtcttggaagtatcatgagccaccccggcgcctatcgaccggtcgtcgccatcgatattggcggcacaacgatgactattgccgaagtccgttccgacggaagcgtacgagatccggtgacaatggacagccccgcacgaatccatggcgacgaagtggtggcccgaatatgcgagcttgtcgagacccgctggccccatccgtgccggatcggcatagggaccgcaggagtcgtcgaccctatcagtggctcgatcggcagagcatccgactccttccaagggtggaccgggtacccactacgcgaacgtctggaagaggcccttggcgtggcggtccaagtggaaaacgacgtcaatgccttcctcgttggcgagcaacggttcggcgcagcggccggggagcgcgactgccttgggatcatgcttggtaccggtgtcggcggagccgtcatcctcgacggacaggtgattcatggtcggcgcggggccgcagccgaaatcggtcatatgcctgcgctaggaaacgatcgatgcagttgtggcgtccccggacacctcgagtcactcgctgggggaagggccatcgcccgacgctgggctgcggccactggacgggatcccaaatccgtcaatggcgcccgtgaggttgcccgccgggcggcaaacggcgatgctgtggcgccgcgaatactcgccgaagctggaaaagccctaggaatcgcactagtacaagccgcgaccctgtttgatctgagtacggtcatcgtcggaggaagcgtcgcaagggcatggcagtggctctcgcccggcctgcacgacgtcgtgacggcgtacccgttgatctccggggctgaattgcgggtgcgtcttgcctcgcttagcgaccgcgcggtcctcataggcgcagccagtcttggggtctgcgacgatcaatggacgaagccatgctgaacttcgacgaacgcaccggcccgaatcagggagtgaacgccccgcactggccgtcggtccaggtgcctcaatggtggaaagatgccaaactcggattcttcatccactggggcttgtactcggttcccgcctgggcgaccaccaatcccgacccggtaccacttgagcaggagtacgcccaccactgctacgccgagtggtatgcaaacacggtgcgcatcctcaactctcccactcgccgacatcacgacagggtatacgggatcggaacgagctatgaggacttcgccgactggtggagccccgacctagatgcacctgccacgctgatccgtcgaattgctgacgccggggccgggtacgtcatcccgacgacgaaacaccatgacggattctgtctgtggcataccgacacgaccggcttcaatgccgctaaacgaggaccgcaccaagatctcgtcaaggccttgcacgacgaggcgcgagcggcaggacttagattcggcgtctactattcgggagcgctcgactggcatgttggggacttcggggcgatcacctctgataccgagctgttcaccttccgccgcaacgaccccgacttcgccaaatactgcgccgctcaactcactgaacttatcgcacggttccgaccagacatattgtggaatgacattgagtggcccgatgcgggcaaggggagtcagccctacgggctcgccagcctgttcagccactacctgaagcaagtacctgagggggtcgtcaacgaccgctggggagtatcccaccacggattcctcactcgggagtaccgtcatgttgacgccaaaatcaacgaaccgtgggagtcgacgcgggggctcggacgttcttttggctacaaccaagaagagtcgacagacgagagccttagtggcaccgagctcgtccagtacctcgtggatgtcgtcgctaaaaacggaaatctgctcattaacgtcgggccacgcgctgacgggtctattcctgaggtgcaggccgctgcaatggccgaactcggacggtggatgagggtgcacgatgaagccattcggggtacccgaccctggggaaacggggtctacggtgaccagcgcatcgtcaagcgtggggaaactgtctacgtccatctgctcgacggggacgcgctccacctccctgacgagctccagggcttcgatgtcagctggatcggcagccagagcaagcagacctctgtgccatgcgagctcgttaaccagccggtcaaggtcgcgaggctcacccggtgaggatggatcccagtcatgtagtaaacaccgaccgcgataggacctcttagttgtgagggggatgggaccggcagagctatctcagtgaagcgattcccgggaggtcaccacacccggagcgcatcccgttcgtccatacgcagcggttgcagctttgagggcgtgtcctccgaggtccaatcgttgcgaccacgtacttatgcataaggtcg

SEQ ID NO: 73 - DNA, 18954 bp, Propionibacterium acnes
  source 1..18954: mol_type = genomic DNA
catcatgccgacgtcaaggatcggcgcggccatccaccgggggacacgctgaggctcgggtgatgagggtcgtaggaatctcgactgttccactgggatccgttccaagggcaagacgggccgcagtttctcccacggcggcgaaatcaagccgcaccgtcgtgagcgctggccgagtggccaccgaatggggatgatcatccatgccgacgaccgagacatcctcgggaactctcaaccccaacctgtcaagccctgttaagaggccgagagccacatcgtcgtttccacataggactgcggtcacctggtgcgctcgtaccgcccgtgcaacgtgcatacccgtctcgactgaccacccagtcgccaatggttcgagcggcgggagacctcgagtagccaggacttcgcgccatcccgcacatcgtggatcagggtgccctgcaggaggaactccgacataggcgatgcggcggtggcccaaacccgccaagtattcggtggccattactgcaccggcatgatcatcgatccacgcccgagaccagggctcgcctccctcgggtttgcctccggcaatggcaactgggagatcgacgggcaacccaggcaggagggccacgctgggggaatcaaattcaaggacgacaaccccgtcggcacgagcgtctaaggcacattgcacggtggaacggcatcgctccggcgaccccgccaatacatgtagggaggtctcggcaccgaggtcgagggctgcgctgagtacccccgagagcgtcgcccagtagccggtgcggccgatgtcggagacgagaacgtgcagccgggcgacgtcagggtcggtgcgccaatatcccagctcggtggccgcggtgaggatctcctcggtggcctgcgggagggcaccttcagcgccattctgacgtgccaaggcacgcgacgccgttgccaacgagacgccggagcgctcggcgacgtcagccaaccgcggaggccaccagggccgcctcaccatggccgggtcacgttccatgcaccggacgataccgggttcacacccctgtcctcggcaagggcgtccgcggaagaccagggcgcgacggggccgcatccgcggctgctgaggtggagcgagccggggtggacggaacgggaatcgacgtcgccgatgggccgggaagaggcgaggggatcgtcgtggtgagcgtccagaccgctgccgtggccaaatccgagccctcgaccacccggctgtcagctacgacgatcggcaggccggtgaactttgagtgcagggtacgccccgccccgtttgcaagcaggtgccagcggttgaggctgccctcagtatccgacgtcgtccgacgaccggacccgacgacgacctcgtgcttcccaacctcggcgtcgagaccaaggaccgcgccgccaggagtcgaaaggctgtaagtgcaatcgtcgtgccgaaccacacaccaagtctgaggctgcgcctgcagggtagggacaccgtcgtgaaatgccaagaatcgcccgtccgcgctagtcagccggtagtcgccgggctccagtgccgggttgggggcgtaccaagcgcgcacgtagtcgatgtcaaaactcgccgggagtcgatggacgactggggcccccaggtgtccctcaagactgagcaccatatgccgcgacatccgccacagcgaagggtcgccgggttttgtttcccaggccaggtgtcggtcgaaataaaatcggagttgaccgtcgcggcgttcgacgccatacgtgtggtagtcccgcgaaatgtcgacgccaaccgggtaggcgtggcctccgaagcgccggtgcgtgacctctgtgttatcgggccacacgtgggtcgcgatgttcatcttcgtgtagtcaaaagtctcctcgacgtcaagctccgggtttggctcggcgccggtaagcaaggaagggccaccgtcgagggcggacgactgcatccagatggccgacagcacccgggcggccgagggcaacgccttggcacgcacctcgacgtaggtgcacagacccggcacgtcaaagactgactcaacggcgccaaacgtgtaggaaaaactatcgacctgctcggcacgagcagccaaatggagttgcccgcctgagaaagacacattcgcgtctcgaaagaggccacttcccgagtgtgggtaccacaggccgcgatgccactgggccgagctgtgagtcggatcggtgaattcgtctccaacacccaggagggtccagccagcaaggtcgatatcggcatcggcggcgatagcccgatcgtggtcggcaaccaccggaacggccgccgtgagaacggcagctccgaggactgatctacgtgtgatcagtgtcatgtgtgctcctttgcaacaacgtcactccctaactggggttccatgcagcctacgacgaatgactgcggtcaccacgagcgcgtgaaaacggcctttcatgcgctgtggacggcccctttcccggcacctagggtgaacgacatcacgaacgacggccaatgtcggccagccaggagttcaccaccatgcacgatgtcacccctgtcatccagccgtttcggctcgcgacggcccccgaccaaccggtcggcttggcagccgggactcttgacggcgcggtggcgcttcccctcgtcgaatgcctcaccctcgaacacggccgatgcttcgtcgaccatcgcctcacccaaactacggtgggatccggtctgcgtcccgttcgccgcgaaccgctcacctcgccgtggcccggcacccgcgtcatccagcatgatcgaggatccgacctcaccgtcaccgtcgatctgtggcatcccacctcagcgaccttgcacgggcgaacaaccgtacataatgacggcaagctcccagtccatctcactgccgtctctatcatgtgcgccagtctgctgtcaggagccgaattcgatgacctcgatatactcatcgcacccagcgcatggatggccgaacaacggtggacccatcaccgcctgtccgatcttctggtggacgtcggcaccgaattgcatggagaatccccgcgcgaccgcttcgtcctatcctcagagtccggttggtcttcaggacgttgggaaccggtcggcttcattaccgacccggcctctggacgcgccgtcggctggcagatcgagcacaacggtggctggactgtcgaattagcccggcgctcttcaaccctcggcctctgcctcttcgggccgaccgaccttcagcaccactggatgcaccagctcaaccctggcgagactttcactacccccgcggtgacgttagtggtatccgataacagctggcagggcgcggcagccgaactaagcacctaccgccgtgtattgaggggcaacaatggcacagcagctccgatcgtcttcaacgactacatgaacaccctcatggccgaccctacggccgagcgactctcgaccctcatcccggccgcagctcgcaccggagccgaggtgtactgcatcgacgccggatggcactccgacgacacagactggtgggacgacgtcggccgctgggagccctcgccccgccgatttcccggcgggctgcgccacacccttgatctcatcgtcgcctacggcatgacgcccggcctgtggattgagccgctggcggttggtctgcgcagtcctctcgtcaatgatctacccccggaggctttcatgcgccgcgcaggggttccgatcgtcgaacagaatcgggtgcgtctagatatgcgcaatccgcaagctcgcgctcatctagataccgtcatcgaccggatggtcagttacggcatcggctacctcaaaattgatgacaatttctctgtcggttctggccccgacgaggacgcggattctcctggggacggtttgctggggcactgccgcgcttgggccgcctggcttgccgacctccctcgacgtcaccctggacttgtcgttgagaactgtgcatctgggggcatgaccaccgactacgccctgttggcccgagcagccatccagtcgacatcagacctccaggattcggtgcgttacccgcccatcgccgccaattcaccgatgacgattttgcccgaacaagccgccaattgggcttacccacagccagacatggacgacgaggaaatcgtctttaccgtcacgacctccttggccggcaccttttacttgtccggtcatgtcgaccgcatgaacgcccaccagatggctctcgtgcaatccggcgcagaggtagccaaggccttacggtcagatctgaccagccaaataccgtggtggccgaaaggccttgccggctgggacgacgagtgggtcgtcaccgggcgtcgaaaaaagtcctctcgcgacggggtgatcattgtctggcaccgtcctagcaccgaatcgacggttctcgacttacctgacctggctgggacccacctcgaacccctttacccacctgcctccctggtccccgacccaggaattcacattgctgactcatcgggttcacctcggctgagttgtccgtctcccaaaccaaccggccgggtcttccgcgtccgggaccttcacgattgcgtcaccgatgtcgcagaaatggagaagaaatgaatcgcaccctcaaggtcgccgcagtaggagccatcgcgatattgtgcctcgctgcctgctccgacccaggctcagactcggcgcaatcctcaggaccggagtcatggccgtcagcaaccaccaatctcaacggtgtggagttgacaatgtgggccgcccagtcgtcggcgtcgatccctcaacaggtcgccgtggacttcaacaaggctaccggggccaagatcaagatcgtcacgatccccgacccctacgagcagagcgtccagaccaaagtcgccaccggtgacgtccctgacctggccatgtggcagccaacgacgtcaatgctcacgagcctgggagccaaagagcatctgcaggtgctcgacgatgccccgtgggagtcgaagactgacaagaacgtcctggctgccggtggttctctcgacgggcaccgctacgccgccttcgtctcagccccctcggtcatgggcgtttggtacaacaaagaagttttcgccaagaacggcatccaggtgccgaagaatttcgacgagatgctcaccattgccaagaagctcaaggctgccggccagaccccgttctacgagatgggcggagagtggtgggcctcccagtgggcggtccaggtgcaggtggccgacgccgccaaggccggtctgtgggacaaggtcaacaagaacgaggacaagttcaccggcactgagatccaaggtgctatcaacacctacgacaccatgatcaaggaaggtctgttcaattcggacatcacaaccggaactttcaacgaccaagccaaggcgctgcttgacgggaaagcagcgatggccattcaagtaacgagcctattgggcaacatggccgcccgagccgacaccgccactctcgacaagaagatcgggttcttccccatctctaagtcgggcaccgtggcaacgtcgatccccgaccagaccaacgccgtggtcgccttcaaatcgaaggatgccaagaaggagactgcgacacgtcagttcatcacctactggttgtccaacgactacgcgtccttcgtcaaggtacaaaacaccgtttccatcattaacggtgttaaaacgcccgattccgtgcccaaagccctcatcgactcgaacgccaccctcaaaggttcggtcggctcgatgcagtctctggctgtcgccaaccccgacttagctaagaacctcggtgacatgatcgctggcacgaagactccagcacaggtgggctcagagactcagtctcagttcgcccagctcgccaaggcgattggcgcgaaagggttctgatccatatgtcctcgatggaagccgcaccgcgacacggcagtgcaaaccagtcgcatccctggggattcgttgtacccgcgttcgccgtgctcgcggtgttcttcctcacgccaacgatctacaacttcatctacgccttcaccgactggtcgagcttcaaaacggccatcaatccggtgggatggagcaatttctccgatctcatcgcatcaggaagcctgcggaaatccttgactatcacccttatttacgcggctggcgtggccacgctgcagaatctgttcggactgatgctggccgtactgttggagcgcgacaccctcgtcaacaagatcgtccgggtgatcttttttatccctgtgatcctctcggcgctagcgactggttacatcttccaagcgttgctgcgccccgacggcgggctcaaccaaatgctcggaatattcacgggatctccggtaaaagtctcctggctgggatcgacgacgtggactctgctcgtgtgcattgtcattcactcgtggaagtggatgggcatgtcgatgctcgtgtacctggccgggcttaagacgatcgatgcccaagtgctcgaggcggcacgcatcgacggggcgtcacggtgggcgaccttccaccagatccgcttgcctctcatcgccccagcggtgacgttcaacgtcgccaccgccttgctggggtcgatgaactccttcgatatcgtccaggcgactacgggcggaggccccggcggctccaccgaactgcttaacctcttcatcttccgaactttcggccagggcctctacgctcaggcgacgacgatgagcctggtgctcttcgtggccgtcgtcatcttggcattccccgtgatcgggatgcttcgtcgccgtgagggaaggatgtcatgaccaaacgcatcattcagccaattggcgcggtactgctagccgtgctcgtcgtcgggatacccctgtggacggtcgtcgtcactgcagggaagtcccaggccgaagcactcatcccggacatatcattgccacaccactggcaactgtggaccaacgtctccactgtcaccagccagacaaggatcggctgggcatatctgggctcgttgttcctgctggtgccctcggtggtcatcgtcttgatcatcggatcgatggcatcgtgggttttagctcggcgcacaggcaagctcgtctccgtgatctacgcgctggggacttcgggcatcatcctgccgccagcggtcgtcaccttggtgttactgctgcgtcagctgggattggctggccgccccatcggaatgatctgcgcctatgtcgggatgtacctgtcgacggtgattttcttcgtcactggattcgtccgcacgatacccgagtccctcgaggaggcggcccgaatcgatggagctggaccaatgcgcgtctttgtgacggtcatcctccccttgctgcgtccagtgctggcaactgcgacgattctcatcagcctgtacgtgtggaacgacgtcttctatgccttcttcgtcgtaggaggccggatggacaccttgccgctgaacttgtttacagtcgccagcgccggggtacacctcaataactggcatctcatcttcacctatgtgctgctcatgagcgtgccgatcgtgatgctgttcattgcattccagcgcagcattatttcaggcattacttcgggtgcggtcaagtaacccttcttactgcctggggccttcgatcggactggcgaaatctccacaacgctcaactggtagtgacagtgaggtctggatcctgcatgtcttcgtcgaaggggaagatcggacgacgcagatggttatggcccagacgcataaggtcctggtccacaccgccaggggtgagcgccatgatccaatcggcggccaagtcgtaaaggtccggctcgagatacccgatcttcaccacgactatgtcggtcgtccgagggtccagttgtacccgctcaaactgttccagggtcgtgtactgatcgcgccgagtcgtcacgatgacgctaagccccccgattcccagcactgccgtacgcaggccgccaggatcgtcaactaggcagcgcacctgggcactcaggtggatagggccaggcttgcgagtatcgacatgtccccctaaatccacctcaaccatgcccccgacgcccgcttcgtcagcacgtttcacgacctgtgggtcatagatggaagcatgaatcgcggagagctccccaccagtgatctcgggatgggccagcaatacagatagcgcaatcgtcacgtcatcagcaccgccagcgcccggattgtcccccgagtcggaaataacgaacggccgtcgcgaggacgccaccgccctgtctaccgcttgttcgatcccatcggtgggagcgacgaagacgaattcgcgacgcaccttccagaagaactgtgcaatctcgctcaccccgtcgcgtacgtggttctcgtcgtcaccgaacccgacgacggctgccgtgcatcgaggctggtcggcccaagcaaagccgatccacaccccaacatcggtaacaccgtcgtgagccgccacctcgggcaccatgtcgtagagcgaagccgccggttcgatcctggtggacgtcttttcaccgggtaacagaatcggcacggtgaccatcgccttgatcggtttgcccttcccggaacgcagtcgctcgcacaatgtccgagccgctctctcccgtgacacccacgcgtcctcgtgcggtgccatccgatagcaggtgagcaggtcgcagcccgcgaagagtttttcagagacgtttccgtgcaggtccatcgaggcactcaccattggctcgggaccaaccacgtcgcggatggcgctgatgagatctccctcaacgtcgtcgtagcccggcacgctcatggctccgtgaatgtcgaagaagatcccgtccacatgaccggccttcgccaggccgtcgcagatttcggcgcgccacttctcgtaggtcagacgttccacgggtcctcccggcagggctgagcagtgcaggatcggtacccactcaacgtcatggttccacggacgttttgtcggcacatcccactcctcgcctgcgatggcccggggcacctggtctatgccggggatcggggactcggtgatccacgggtatcgctccagcagtgtctggccgcgacgctgcgtgaagtcagcggccgtgctcatgtagggggtgaaagtactcgattcaatatgaagtccacaaatggctatacgtatcatcagcgattgccttcctgtgagatgggcatatgagagtcaagtatcgacatgccgatgagcggggcatcggctccgcaagcagaggtctcgatcacgagatcctcggtgcacatgggcaaacagcgctcgtacagttcactgcgtacgccagcgagcaaagaacccatctgcgacattgagccgcccaacacgatgcgaaccgggttgaggaagttaacaaggttggaaagcacctcaccaagacgcattccggcgtcacgcactaaggaaaccgcctggggatcgccgctgttctcggcagtcaccaactgtgaggttgtggaaatggacgagcccaaacggcccagctgccgtaggatcgcagcccccgatgccaccgtctccaaacacccggagttaccacaggtacacggtagggggttatcggtatgcacccgcagatgggtgatgtcgccagcaagaccgcgtgagcctcggtaagcgaccccgccgctgacccaaccagcacctatgccggtgccagctttaacgtagatgcaggagtcccggtgccgtccgcggcagttccactccccgattgtcgcggcacgagcgtcattctcgataactgatggcaccgcgagttcctgtgccaacatgccggcgatgtctttgccactccacccaggcatccgcgctgccccaacgacgtgaccactaccgtccaccgggccgggtaccgccaagccggctgaaaccaccgctccagggatctcgtcaccaagcttgtgccaccccttggccaaggctttgatcgtcttctccggaccgatctctatgtttatcttgatgtcgtcggtagcgagtagctcgccctcccgagacgctattgccaaccgggcatgatgctggccaagttctgcaacaaaggcattgccgactgctggtgcaacgcgcaatttagtgggacgacgaccaccggtggaatctgcgcacgcgtactcttcaacgactcgcgactcgagcaggtgtcgcaccgccgcgctcaccgtggaacgtggcatggaagtgctctcggcgatctcggcgcgagtcatacccggcgtttttcgaagaatcttgatgactcgctgcccaggcgcgctgcccagctgatcgtcagtgtgcccattcatgcccgtcgcgccaaggttggtgagctcaatatctgtcatcagcttcctcaatccgtcatcgtgcctgcccgacgtctcggcccacagtatgcccgcgtccggagatatgtgtagcaaaagtgataaaagctagattattttacattcgaagcatccgaagtcatcaccttgcgctactcttacggtagtaagggttcatcccaccaggcaacggaggctgagggaactcatgaagaaaccacgaaagagactgcttgtggtgaccgcagcagtggcagcaactctgttggttgcctcgtgctcgtatggcagtggcgaccccagtcgatctcaggcaagcggcggcgcgcaggacggcaacgtatccttcgcgaccaccacgcccaactggatcctcccggtgtccgcacccggaaagacgcagggtgagaacgccatgttcacccagctcatttaccccgccttgttctcctacaagctcgacgcgaagaacgagttcaacattgatgaacgccactcggtggccaaacctcccaccgtgtccgacgactcactcacctacaccatcacccttaaggaccgcacatggagcgacggcgtcaagctcactacgcgcgacatggagttctggtggaacatcgtcaccaacaacaccgacaagtgggcgtcctaccgcaaaggccagttccccgacaacgtcaaggctttcaagatcattgacgacaaggccttcaccatcaccacgactgagaagtacaacccggcatggttcatcaacaaccaactgaaccgccttgtgccaatgccagcccacgcctggtctaagaccagcgactccgacaagcccggtgagaaggaccgcacccctgccggagccaaggcaatcttcaaatacttgagcgccgcctcggaggacttacagaactacgacaccaacaaactctggaagacgactctcgggcccttccagctcggcaagtacaccccgaacggtaaggccaagctcgtcgccagtcctagctacgacggtgaagacaaggcgagcatttcgagcttcaccatgcagccgtacaccagtgacgacgctgagttcaacatcctgcgctccggaagcatcgactacggcttcatcccacccaactcgatgacccagcaaaagtacatcgagaaacagggctacaccgtcaaaccgtggtacggctggtcgatcacctacatgccgtttaacttcaacaacccgaagtccggcccgatattcgcccaaaaatatatccgtcaggcgatgcaacacctcattgatcaggaaggaatctccaagatcatctggaaccggactgcatcccccacctgcggcccggtaccccagcaacctggcaccgccggtagctccaaaggttgcgcctacgactacaaccctgcgaaagctgagaaactcctcaaagaccacggttggaatgtcactaaggacggaatcaccacctgtcaacaagccggggagggcgaaggccaatgcggcaaaggaatcaagcagggggccaagctttccttcaccgtgatctcccaatccggtttcacctcgaccacccacatgttcgccgaactcaagtcgagtttttccaacgtcggtatcaacttggagattcgagaggttcctgactcggtggctgagtcccaagcctgtaagcccaacgacacgaactgcaagtgggacctgtcattctttggttcgcagtcatcgtggtactacccggtctacgcgtccggtgagcggctcttccaaagcggtggcccggtaaacctgggcagctactccgacaagaaagccgacgagcttattgacgcgtccatgcgttcgaacgatcggacagccctcaaaacgtacaacgcctatctggctgaagacctgccggtgttatggatgccgaacccggtcaatcgcgtctcagcatggaaatccaacatccaaggaatcgatccacaggaccccatgctgtacctgtacccgcaggactggaccatcagatgacctcacgcagagtgagcccacgttactgaccccgcccgtttcacacggcgtcaccgggtcgccccggtgacgccaccccaacgtcccaatcacccatctcaggagggagcaaaggatgacgcgatacatcgcgcaacgcgtttttcaagcgctgatagtgctgttgctcgtcacgcttatcactttctccatccttcacgcacttccaggcggagcagctcgctcggctttgggactggacgccacccaagcgcagatcgacgcatacaaccatcagatgggttacgaccaacccttatggaagcagtacttcggctatctgatccagatcttccatggcgaattcggacactctttccgactcaacatgccggttgccgacgcgatcggtcagcggcttcctaagacgattgtcctcagtctcatgtcggcagtcgtcgccatcctcctcgcgatccctatcggcgctatccaagccgtcaagcgcaaccgcacggctgactacactctcaccgtcatcgccatgctggcatattccacaccattgttcttcctgggcctcgttctcatcatcctcttctcacaggtgtggccgatcttcccaccagaagcgccacaagggttcagcgtcggagaagttcttagccaagggcgatcgctcgtgctgcccaccacgacgctcgccatcgtcacgctggccgtgtacgcgcgctacatgcgttcctcgatgattgacaacctcgaggaaaactacatccgcaccgcccgcagtaagggaatcaccgagacaagagtcgtcatcgttcatgccctgcgcaactcgctgtttccgatcatcaccctactcggcatgcagttgccggccttgttctccggtgcgctggtagtggagtcgctgttcaactaccccggcatgggtctgttgttctggcaggcggcccagttccgcgactaccccatcctgctagcagtcaccatcatcatctcaatggccaccgtgctcggcgccctcatcgcagacatcctctatgccgtcgtcgatccgcggattcgttacggaggagcagaccgatgagcaccgagatcgctattcccgatcctcagagccgacgtcccgaatctgcccgtcccatgcgtcccggcacagcgcgacggaccagcagacgcaccagcctcttcaaacagggggtggaggtgttcttcgagaaccgtttggccgtcgtaggatttgtcaccctgcttatcatcgtcgttctgtgcttcatcggaccgtcgatctggcgcaccgatcaggtccacacccagctgtccagcgcttacctccccatctccggcacgcaccctcttggtacggacgcggtgggctacgaccagctcggacgactcatgctcggcggccagacatccatcatcgtcggcctggcagctggcatcctggccaccaccatcggaacgatttggggcgccacagccggattcgtcggaggatggttagacgctgcgatgatgcgaatcgttgactcactcatggctatcccggccttgttcctcttcatgctcatcgccacgctcgtcacaccgaccgtgcccttgttggtactcatcattggcgcatttgcttggctcaacccagctcggctcatccgcggtgagtcgctggctctgcgcagccgggaatacatcgtcgctatgcgtggcatgggcggtagctctctgcgcgccgtacgcactcacgttgtgcgtaatgccatcggcaccgtcatcgtcaatgcaaccttccaggtggcagacgccatcctctacgtcgcgtacctgtcatttctcggcctcggggttcccccaccagcggccaattggggcggcatgctttccgacgggctcgccgaggtctactcgggtcactggtggctgttatacccgcccggggtactcatcatcattctggttgtcgcgtttaacttcgtcggtgacggattacgggacgccttcgaggttcggctgaggagtagatgacatgagcatgtcacagcccgaagacatcttgctgcgtctgcaagatctggaggtcactattgacgtgcgcggtggcagggtcgcgcctttgcggggctgctccatggaagtacgacgcggcgagacgatcggtctagtcggcgagtccggatccggtaagacgatgacagcgctatccatcatgggcctgctcccccacggtggacgggttaccggaggatccatcgtcttcaacggcagggacctcactagttcgccacccgacgagacccggcgcattcgcggtatggacatcgggatgatcttccaagacccgctcacctcactcaacccgacgatgaaaatcggtaaccaagtaggcgaagcgctgagaatccacaaggtggcctcgaagaagaaggcttgggaacgctctatcgacctcctgcgcaaggtgggaatgccacgtccggaaaagatcgtcaatgactatccgcatcagctgtctggtggtatgcgtcagcgagtcatgatcgctatggcactcatctgctcacccagtcttctgatcgcggatgagccgacgacagctttggatgtaacgactcagcggcagatcctcgacctcattgacgacctcaagaaggagttcaacaccgccgtcatcctggtgacacacgatctgggagtagttgcgggccgggccgaccgggtagccgtcatgtatgcgggtcagatcgtcgaggtggcatcgtctaccgacattttcatcaacccccagcaccagtacacgcgctcgctcattgccgcactgcctgagcagaccaccgatacccgtgaggagctctacaccatccctgggatgccgccggacctgcgcgagaagatcgtcggctgcgccttcgctactcgttgcccgctggccactgagatctgcactcagtccaaccctcacatggtcaccctgggcagaaccgacgcgccaagtgccaacaacgaacccgccaaccatgtacatacctgcttccatccggcagggccgccgctgaagcgccgacacgacctacgcccggagcgagacctgtccagccaccccgttgtgtgctcagtgcaagatctccataaaaactaccctgccatgagcagcggcgtcatccggcgtcaaatcgggtgggtacgggccgtcagcggtgtcagctttgacgtctatgagggcgagacactggggatcgtcggtgaatccggttgtggtaaatcgaccttagggcgcgtcatcactgcgttggaaccagcgacctcaggctccgtgtgcatcaatggcaaggatattgctcaggcgtcacgcagggaacgcaccctcttgcaccgcaatgtacagatgatgtttcaggattcctacgccgcaatggatccgcgcatgcgagtagacgagatcctctccgagccccttagcatccaaaaaatcggagaccggcgttcgcgtgccgacgctgcggacaatctcatcgacaagatcgggctgtccgataacgccttgtcgaagtacccgcatcagttctctggtggccaattgcagcggatcggccttgcgcggtcactgatgctagaaccccatctcattgtctgtgatgagccagtcagtgccttggatgtatccgtccaggctcaagtgctcaatctcatgcgcaggctccagcaggagcagaacctcacctacatcttcatctcccacgacttgtctgtcgtcaggtacatgtcggatcgaattgccgtgatgtacttaggaaaaatcgtggaaataggtgaggctaacaaggtcgtcgaccacccacgtcacccgtatacgcgggcactgatcgaggcgatccccgttgctgaccccgcgcatcacgtggaggagatcgtgcgtctgcagggtgaaccagccagtgccatcgacacgcctccggggtgccgtttcaaaaatcgatgcccatttgccaccaacaagtgcgccgaagaacccccgttagtgggcgacactcaccgagtggcctgccacttccctctaccacacgacgtcttggaagtatcatgagccaccccggcgcctatcgaccggtcgtcgccatcgatattggcggcacaacgatgactattgccgaagtccgttccgacggaagcgtacgagatccggtgacaatggacagccccgcacgaatccatggcgacgaagtggtggcccgaatatgcgagcttgtcgagacccgctggccccatccgtgccggatcggcatagggaccgcaggagtcgtcgaccctatcagtggctcgatcggcagagcatccgactccttccaagggtggaccgggtacccactacgcgaacgtctggaagaggcccttggcgtggcggtccaagtggaaaacgacgtcaatgccttcctcgttggcgagcaacggttcggcgcagcggccggggagcgcgactgccttgggatcatgcttggtaccggtgtcggcggagccgtcatcctcgacggacaggtgattcatggtcggcgcggggccgcagccgaaatcggtcatatgcctgcgctaggaaacgatcgatgcagttgtggcgtccccggacacctcgagtcactcgctgggggaagggccatcgcccgacgctgggctgcggccactggacgggatcccaaatccgtcaatggcgcccgtgaggttgcccgccgggcggcaaacggcgatgctgtggcgccgcgaatactcgccgaagctggaaaagccctaggaatcgcactagtacaagccgcgaccctgtttgatctgagtacggtcatcgtcggaggaagcgtcgcaagggcatggcagtggctctcgcccggcctgcacgacgtcgtgacggcgtacccgttgatctccggggctgaattgcgggtgcgtcttgcctcgcttagcgaccgcgcggtcctcataggcgcagccagtcttggggtctgcgacgatcaatggacgaagccatgctgaacttcgacgaacgcaccggcccgaatcagggagtgaacgccccgcactggccgtcggtccaggtgcctcaatggtggaaagatgccaaactcggattcttcatccactggggcttgtactcggttcccgcctgggcgaccaccaatcccgacccggtaccacttgagcaggagtacgcccaccactgctacgccgagtggtatgcaaacacggtgcgcatcctcaactctcccactcgccgacatcacgacagggtatacgggatcggaacgagctatgaggacttcgccgactggtggagccccgacctagatgcacctgccacgctgatccgtcgaattgctgacgccggggccgggtacgtcatcccgacgacgaaacaccatgacggattctgtctgtggcataccgacacgaccggcttcaatgccgctaaacgaggaccgcaccaagatctcgtcaaggccttgcacgacgaggcgcgagcggcaggacttagattcggcgtctactattcgggagcgctcgactggcatgttggggacttcggggcgatcacctctgataccgagctgttcaccttccgccgcaacgaccccgacttcgccaaatactgcgccgctcaactcactgaacttatcgcacggttccgaccagacatattgtggaatgacattgagtggcccgatgcgggcaaggggagtcagccctacgggctcgccagcctgttcagccactacctgaagcaagtacctgagggggtcgtcaacgaccgctggggagtatcccaccacggattcctcactcgggagtaccgtcatgttgacgccaaaatcaacgaaccgtgggagtcgacgcgggggctcggacgttcttttggctacaaccaagaagagtcgacagacgagagccttagtggcaccgagctcgtccagtacctcgtggatgtcgtcgctaaaaacggaaatctgctcattaacgtcgggccacgcgctgacgggtctattcctgaggtgcaggccgctgcaatggccgaactcggacggtggatgagggtgcacgatgaagccattcggggtacccgaccctggggaaacggggtctacggtgaccagcgcatcgtcaagcgtggggaaactgtctacgtccatctgctcgacggggacgcgctccacctccctgacgagctccagggcttcgatgtcagctggatcggcagccagagcaagcagacctctgtgccatgcgagctcgttaaccagccggtcaaggtcgcgaggctcacccggtgaggatggatcccagtcatgtagtaaacaccgaccgcgataggacctcttagttgtgagggggatgggaccggcagagctatctcagtgaagcgattcccgggaggtcaccacacccggagcgcatcccgttcgtccatacgcagcggttgcagctttgagggcgtgtcctccgaggtccaatcgttgcgaccacgtacttatgcataaggtcg

SEQ ID NO: 74 - DNA, 18955 bp, Propionibacterium acnes
  source 1..18955: mol_type = genomic DNA
catcatgccgacgtcaaggatcggcgcggccatccaccgggggacacgctgaggctcgggtgatgagggtcgtaggaatctcgactgttccactgggatccgttccaagggcaagacgggccgcagtttctcccacggcggcgaaatcaagccgcaccgtcgtgagcgctggccgagtggccaccgaatggggatgatcatccatgccgacgaccgagacatcctcgggaactctcaaccccaacctgtcaagccctgttaagaggccgagagccacatcgtcgtttccacataggactgcggtcacctggtgcgctcgtaccgcccgtgcaacgtgcatacccgtctcgactgaccacccagtcgccaatggttcgagcggcgggagacctcgagtagccaggacttcgcgccatcccgcacatcgtggatcagggtgccctgcaggaggaactccgacataggcgatgcggcggtggcccaaacccgccaagtattcggtggccattactgcaccggcatgatcatcgatccacgcccgagaccagggctcgcctccctcgggtttgcctccggcaatggcaactgggagatcgacgggcaacccaggcaggagggccacgctgggggaatcaaattcaaggacgacaaccccgtcggcacgagcgtctaaggcacattgcacggtggaacggcatcgctccggcgaccccgccaatacatgtagggaggtctcggcaccgaggtcgagggctgcgctgagtacccccgagagcgtcgcccagtagccggtgcggccgatgtcggagacgagaacgtgcagccgggcgacgtcagggtcggtgcgccaatatcccagctcggtggccgcggtgaggatctcctcggtggcctgcgggagggcaccttcagcgccattctgacgtgccaaggcacgcgacgccgttgccaacgagacgccggagcgctcggcgacgtcagccaaccgcggaggccaccagggccgcctcaccatggccgggtcacgttccatgcaccggacgataccgggttcacacccctgtcctcggcaagggcgtccgcggaagaccagggcgcgacggggccgcatccgcggctgctgaggtggagcgagccggggtggacggaacgggaatcgacgtcgccgataggccgggaagaggcgaggggatcgtcgtggtgagcgtccagaccgctgccgtggccaaatccgagccctcgaccacccggctgtcagctacgacgatcggcaggccggtgaactttgagtgcagggtacgccccgccccgtttgcaagcaggtgccagcggttgaggctgccctcagtatccgacgtcgtccgacgaccggacccgacgacgacctcgtgcttcccaacctcggcgtcgagaccaaggaccgcgccgccaggagtcgaaaggctgtaagtgcaatcgtcgtgccgaaccacacaccaagtctgaggctgcgcctgcagggtagggacaccgtcgtgaaatgccaagaatcgcccgtccgcgctagtcagccggtagtcgccgggctccagtgccgggttgggggcgtaccaagcgcgcacgtagtcgatgtcaaaactcgccgggagtcgatggacgactggggcccccaggtgtccctcaagactgagcaccatatgccgcgacatccgccacagcgaagggtcgccgggttttgtttcccaggccaggtgtcggtcgaaataaaatcggagttgaccgtcgcggcgttcgacgccatacgtgtggtagtcccgcgaaatgtcgacgccaaccgggtaggcgtggcctccgaagcgccggtgcgtgacctctgtgttatcgggccacacgtgggtcgcgatgttcatcttcgtgtagtcaaaagtctcctcgacgtcaagctccgggtttggctcggcgccggtaagcaaggaagggccaccgtcgagggcggacgactgcatccagatggccgacagcacccgggcggccgagggcaacgccttggcacgcacctcgacgtaggtgcacagacccggcacgtcaaagactgactcaacggcgccaaacgtgtaggaaaaactatcgacctgctcggcacgagcagccaaatggagttgcccgcctgagaaagacacattcgcgtctcgaaagaggccacttcccgagtgtgggtaccacaggccgcgatgccactgggccgagctgtgagtcggatcggtgaattcgtctccaacacccaggagggtccagccagcaaggtcgatatcggcatcggcggcgatagcccgatcgtggtcggcaaccaccggaacggccgccgtgagaacggcagctccgaggactgatctacgtgtgatcagtgtcatgtgtgctcctttgcaacaacgtcactccctaactggggttccatgcagcctacgacgaatgactgcggtcaccacgagcgcgtgaaaacggcctttcatgcgctgtggacggcccctttcccggcacctagggtgaacgacatcacgaacgacggccaatgtcggccagccaggagttcaccaccatgcacgatgtcacccctgtcatccagccgtttcggctcgcgacggcccccgaccaaccggtcggcttggcagccgggactcttgacggcgcggtggcgcttcccctcgtcgaatgcctcaccctcgaacacggccgatgcttcgtcgaccatcgcctcacccaaactacggtgggatccggtctgcgtcccgttcgccgcgaaccgctcacctcgccgtggcccggcacccgcgtcatccagcatgatcgaggatccgacctcaccgtcaccgtcgatctgtggcatcccacctcagcgaccttgcacgggcgaacaaccgtacataatgacggcaagctcccagtccatctcactgccgtctctatcatgtgcgccagtctgctgtcaggagccgaactcgatgacctcgatatactcatcgcacccagcgcatggatggccgaacaacggtggacccatcaccgcctgtccgatcttctggtggacgtcggcaccgaattgcatggagaatccccgcgcgaccgcttcgtcctatcctcagagtccggttggtcttcaggacgttgggaaccggtcggcttcattaccgacccggcctctggacgcgccgtcggctggcagatcgagcacaacggtggctggactgtcgaattagcccggcgctcttcaaccctcggcctctgcctcttcgggccgaccgaccttcagcaccactggatgcaccagctcaaccctggcgagactttcactacccccgcggtgacgttagtggtatccgataacagctggcagggcgcggcagccgaactaagcacctaccgccgtgtattgaggggcaacaatggcacagcagctccgatcgtcttcaacgactacatgaacaccctcatggccgaccctacggccgagcgactctcgaccctcatcccggccgcagctcgcaccggagccgaggtgtactgcatcgacgccggatggcactccgacgacacagactggtgggacgacgtcggccgctgggagccctcgccccgccgatttcccggcgggctgcgccacacccttgatctcatcgtcgcctacggcatgacgcccggcctgtggattgagccgctggcggttggtctgcgcagtcctctcgtcaatgatctacccccggaggctttcatgcgccgcgcaggggttccgatcgtcgaacagaatcgggtgcgtctagatatgcgcaatccgcaagctcgcgctcatctagataccgtcatcgaccggatggtcagttacggcatcggctacctcaaaattgatgacaatttctctgtcggttctggccccgacgaggacgcggattctcctggggacggtttgctggggcactgccgcgcttgggccgcctggcttgccgacctccctcgacgtcaccctggacttgtcgttgagaactgtgcatctggggggcatgaccaccgactacgccctgttggcccgagcagccatccagtcgacatcagacctccaggattcggtgcgttacccgcccatcgccgccaattcaccgatgacgattttgcccgaacaagccgccaattgggcttacccacagccagacatggacgacgaggaaatcgtctttaccgtcacgacctccttggccggcaccttttacttgtccggtcatgtcgaccgcatgaacgcccaccagatggctctcgtgcaatccggcgcagaggtagccaaggccttacggtcagatctgaccagccaaataccgtggtggccgaaaggccttgccggctgggacgacgagtgggtcgtcaccgggcgtcgaaaaaagtcctctcgcgacggggtgatcattgtctggcaccgtcctagcaccgaatcgacggttctcgacttacctgacctggctgggacccacctcgaacccctttacccacctgcctccctggtccccgacccaggaattcacattgctgactcatcgggttcacctcggctgagttgtccgtctcccaaaccaaccggccgggtcttccgcgtccgggaccttcacgattgcgtcaccgatgtcgcagaaatggagaagaaatgaatcgcaccctcaaggtcgccgcagtaggagccatcgcgatattgtgcctcgctgcctgctccgacccaggctcagactcggcgcaatcctcaggaccggagtcatggccgtcagcaaccaccaatctcaacggtgtggagttgacaatgtgggccgcccagtcgtcggcgtcgatccctcaacaggtcgccgtggacttcaacaaggctaccggggccaagatcaagatcgtcacgatccccgacccctacgagcagagcgtccagaccaaagtcgccaccggtgacgtccctgacctggccatgtggcagccaacgacgtcaatgctcacgagcctgggagccaaagagcatctgcaggtgctcgacgatgccccgtgggagtcgaagactgacaagaacgtcctggctgccggtggttctctcgacgggcaccgctacgccgccttcgtctcagccccctcggtcatgggcgtttggtacaacaaagaagttttcgccaagaacggcatccaggtgccgaagaatttcgacgagatgctcaccattgccaagaagctcaaggctgccggccagaccccgttctacgagatgggcggagagtggtgggcctcccagtgggcggtccaggtgcaggtggccgacgccgccaaggccggtctgtgggacaaggtcaacaagaacgaggacaagttcaccggcactgagatccaaggtgctatcaacacctacgacaccatgatcaaggaaggtctgttcaattcggacatcacaaccggaactttcaacgaccaagccaaggcgctgcttgacgggaaagcagcgatggccattcaagtaacgagcctattgggcaacatggccgcccgagccgacaccgccactctcgacaagaagatcgggttcttccccatctctaagtcgggcaccgtggcaacgtcgatccccgaccagaccaacgccgtggtcgccttcaaatcgaaggatgccaagaaggagactgcgacacgtcagttcatcacctactggttgtccaacgactacgcgtccttcgtcaaggtacaaaacaccgtttccatcattaacggtgttaaaacgcccgattccgtgcccaaagccctcatcgactcgaacgccaccctcaaaggttcggtcggctcgatgcagtctctggctgtcgccaaccccgacttagctaagaacctcggtgacatgatcgctggcacgaagactccagcacaggtgggctcagagactcagtctcagttcgcccagctcgccaaggcgattggcgcgaaagggttctgatccatatgtcctcgatggaagccgcaccgcgacacggcagtgcaaaccagtcgcatccctggggattcgttgtacccgcgttcgccgtgctcgcggtgttcttcctcacgccaacgatctacaacttcatctacgccttcaccgactggtcgagcttcaaaacggccatcaatccggtgggatggagcaatttctccgatctcatcgcatcaggaagcctgcggaaatccttgactatcacccttatttacgcggctggcgtggccacgctgcagaatctgttcggactgatgctggccgtactgttggagcgcgacaccctcgtcaacaagatcgtccgggtgatcttttttatccctgtgatcctctcggcgctagcgactggttacatcttccaagcgttgctgcgccccgacggcgggctcaaccaaatgctcggaatattcacgggatctccggtaaaagtctcctggctgggatcgacgacgtggactctgctcgtgtgcattgtcattcactcgtggaagtggatgggcatgtcgatgctcgtgtacctggccgggcttaagacgatcgatgcccaagtgctcgaggcggcacgcatcgacggggcgtcacggtgggcgaccttccaccagatccgcttgcctctcatcgccccagcggtgacgttcaacgtcgccaccgccttgctggggtcgatgaactccttcgatatcgtccaggcgactacgggcggaggccccggcggctccaccgaactgcttaacctcttcatcttccgaactttcggccagggcctctacgctcaggcgacgacgatgagcctggtgctcttcgtggccgtcgtcatcttggcattccccgtgatcgggatgcttcgtcgccgtgagggaaggatgtcatgaccaaacgcatcattcagccaattggcgcggtactgctagccgtgctcgtcgtcgggatacccctgtggacggtcgtcgtcactgcagggaagtcccaggccgaagcactcatcccggacatatcattgccacaccactggcaactgtggaccaacgtctccactgtcaccagccagacaaggatcggctgggcatatctgggctcgttgttcctgctggtgccctcggtggtcatcgtcttgatcatcggatcgatggcatcgtgggttttagctcggcgcacaggcaagctcgtctccgtgatctacgcgctggggatttcgggcatcatcctgccgccagcggtcgtcaccttggtgttactgctgcgtcagctgggattggctggccgccccatcggaatgatctgcgcctatgtcgggatgtacctgtcgacggtgattttcttcgtcactggattcgtccgcacgatacccgagtccctcgaggaggcggcccgaatcgatggagctggaccaatgcgcgtctttgtgacggtcatcctccccttgctgcgtccagtgctggcaactgcgacgattctcatcagcctgtacgtgtggaacgacgtcttctatgccttcttcgtcgtaggaggccggatggacaccttgccgctgaacttgtttacagtcgccagcgccggggtacacctcaataactggcatctcatcttcacctatgtgctgctcatgagcgtgccgatcgtgatgctgttcattgcattccagcgcagcattatttcaggcattacttcgggtgcggtcaagtaacccttcttactgcctggggccttcgatcggactggcgaaatctccacaacgctcaactggtagtgacagtgaggtctggatcctgcatgtcttcgtcgaaggggaagatcggacgacgcagatggttatggcccagacgcataaggtcctggtccacaccgccaggggtgagcgccatgatccaatcggcggccaagtcgtaaaggtccggctcgagatacccgatcttcaccacgactatgtcggtcgtccgagggtccagttgtacccgctcaaactgttccagggtcgtgtactgatcgcgccgagtcgtcacgatgacgctaagccccccgattcccagcactgccgtacgcaggccgccaggatcgtcaactaggcagcgcacctgggcactcaggtggatagggccaggcttgcgagtatcgacatgtccccctaaatccacctcaaccatgcccccgacgcccgcttcgtcagcacgtttcacgacctgtgggtcatagatggaagcatgaatcgcggagagctccccaccagtgatctcgggatgggccagcaatacagatagcgcaatcgtcacgtcatcagcaccgccagcgcccggattgtcccccgagtcggaaataacgaacggccgtcgcgaggacgccaccgccctgtctaccgcttgttcgatcccatcggtgggagcgacgaagacgaattcgcgacgcaccttccagaagaactgtgcaatctcgctcaccccgtcgcgtacgtggttctcgtcgtcaccgaacccgacgacggctgccgtgcatcgaggctggtcggcccaagcaaagccgatccacaccccaacatcggtaacaccgtcgtgagccgccacctcgggcaccatgtcgtagagcgaagccgccggttcgatcctggtggacgtcttttcaccgggtaacagaatcggcacggtgaccatcgccttgatcggtttgcccttcccggaacgcagtcgctcgcacaatgtccgagccgctctctcccgtgacacccacgcgtcctcgtgcggtgccatccgatagcaggtgagcaggtcgcagcccgcgaagagtttttcagagacgtttccgtgcaggtccatcgaggcactcaccattggctcgggaccaaccacgtcgcggatggcgctgatgagatctccctcaacgtcgtcgtagcccggcacgctcatggctccgtgaatgtcgaagaagatcccgtccacatgaccggccttcgccaggccgtcgcagatttcggcgcgccacttctcgtaggtcagacgttccacgggtcctcccggcagggctgagcagtgcaggatcggtacccactcaacgtcatggttccacggacgttttgtcggcacatcccactcctcgcctgcgatggcccggggcacctggtctatgccggggatcggggactcggtgatccacgggtatcgctccagcagtgtctggccgcgacgctgcgtgaagtcagcggccgtgctcatgtagggggtgaaagtactcgattcaatatgaagtccacaaatggctatacgtatcatcagcgattgccttcctgtgagatgggcatatgagagtcaagtatcgacatgccgatgagcggggcatcggctccgcaagcagaggtctcgatcacgagatcctcggtgcacatgggcaaacagcgctcgtacagttcactgcgtacgccagcgagcaaagaacccatctgcgacattgagccgcccaacacgatgcgaaccgggttgaggaagttaacaaggttggaaagcacctcaccaagacgcattccggcgtcacgcactaaggaaaccgcctggggatcgccgctgttctcggcagtcaccaactgtgaggttgtggaaatggacgagcccaaacggcccagctgccgtaggatcgcagcccccgatgccaccgtctccaaacacccggagttaccacaggtacacggtagggggttatcggtatgcacccgcagatgggtgatgtcgccagcaagaccgcgtgagcctcggtaagcgaccccgccgctgacccaaccagcacctatgccggtgccagctttaacgtagatgcaggagtcccggtgccgtccgcggcagttccactccccgattgtcgcggcacgagcgtcattctcgataactgatggcaccgcgagttcctgtgccaacatgccggcgatgtctttgccactccacccaggcatccgcgctgccccaacgacgtgaccactaccgtccaccgggccgggtaccgccaagccggctgaaaccaccgctccagggatctcgtcaccaagcttgtgccaccccttggccaaggctttgatcgtcttctccggaccgatctctatgtttatcttgatgtcgtcggtagcgagtagctcgccctcccgagacgctattgccaaccgggcatgatgctggccaagttctgcaacaaaggcattgccgactgctggtgcaacgcgcaatttagtgggacgacgaccaccggtggaatctgcgcacgcgtactcttcaacgactcgcgactcgagcaggtgtcgcaccgccgcgctcaccgtggaacgtggcatggaagtgctctcggcgatctcggcgcgagtcatacccggcgtttttcgaagaatcttgatgactcgctgcccaggcgcgctgcccagctgatcgtcagtgtgcccattcatgcccgtcgcgccaaggttggtgagctcaatatctgtcatcagcttcctcaatccgtcatcgtgcctgcccgacgtctcggcccacagtatgcccgcgtccggagatatgtgtagcaaaagtgataaaagctagattattttacattcgaagcatccgaagtcatcaccttgcgctactcttacggtagtaagggttcatcccaccaggcaacggaggctgagggaactcatgaagaaaccacgaaagagactgcttgtggtgaccgcagcagtggcagcaactctgttggttgcctcgtgctcgtatggcagtggcgaccccagtcgatctcaggcaagcggcggcgcgcaggacggcaacgtatccttcgcgaccaccacgcccaactggatcctcccggtgtccgcacccggaaagacgcagggtgagaacgccatgttcacccagctcatttaccccgccttgttctcctacaagctcgacgcgaagaacgagttcaacattgatgaacgccactcggtggccaaacctcccaccgtgtccgacgactcactcacctacaccatcacccttaaggaccgcacatggagcgacggcgtcaagctcactacgcgcgacatggagttctggtggaacatcgtcaccaacaacaccgacaagtgggcgtcctaccgcaaaggccagttccccgacaacgtcaaggctttcaagatcattgacgacaaggccttcaccatcaccacgactgagaagtacaacccggcatggttcatcaacaaccaactgaaccgccttgtgccaatgccagcccacgcctggtctaagaccagcgactccgacaagcccggtgagaaggaccgcacccctgccggagccaaggcaatcttcaaatacttgagcgccgcctcggaggacttacagaactacgacaccaacaaactctggaagacgactctcgggcccttccagctcggcaagtacaccccgaacggtaaggccaagctcgtcgccagtcctagctacgacggtgaagacaaggcgagcatttcgagcttcaccatgcagccgtacaccagtgacgacgctgagttcaacatcctgcgctccggaagcatcgactacggcttcatcccacccaactcgatgacccagcaaaagtacatcgagaaacagggctacaccgtcaaaccgtggtacggctggtcgatcacctacatgccgtttaacttcaacaacccgaagtccggcccgatattcgcccaaaaatatatccgtcaggcgatgcaacacctcattgatcaggaaggaatctccaagatcatctggaaccggactgcatcccccacctgcggcccggtaccccagcaacctggcaccgccggtagctccaaaggttgcgcctacgactacaaccctgcgaaagctgagaaactcctcaaagaccacggttggaatgtcactaaggacggaatcaccacctgtcaacaagccggggagggcgaaggccaatgcggcaaaggaatcaagcagggggccaagctttccttcaccgtgatctcccaatccggtttcacctcgaccacccacatgttcgccgaactcaagtcgagtttttccaacgtcggtatcaacttggagattcgagaggttcctgactcggtggctgagtcccaagcctgtaagcccaacgacacgaactgcaagtgggacctgtcattctttggttcgcagtcatcgtggtactacccggtctacgcgtccggtgagcggctcttccaaagcggtggcccggtaaacctgggcagctactccgacaagaaagccgacgagcttattgacgcgtccatgcgttcgaacgatcggacagccctcaaaacgtacaacgcctatctggctgaagacctgccggtgttatggatgccgaacccggtcaatcgcgtctcagcatggaaatccaacatccaaggaatcgatccacaggaccccatgctgtacctgtacccgcaggactggaccatcagatgacctcacgcagagtgagcccacgttactgaccccgcccgtttcacacggcgtcaccgggtcgccccggtgacgccaccccaacgtcccaatcacccatctcaggagggagcaaaggatgacgcgatacatcgcgcaacgcgtttttcaagcgctgatagtgctgttgctcgtcacgcttatcactttctccatccttcacgcacttccaggcggagcagctcgctcggctttgggactggacgccacccaagcgcagatcgacgcatacaaccatcagatgggttacgaccaacccttatggaagcagtacttcggctatctgatccagatcttccatggcgaattcggacactctttccgactcaacatgccggttgccgacgcgatcggtcagcggcttcctaagacgattgtcctcagtctcatgtcggcagtcgtcgccatcctcctcgcgatccctatcggcgctatccaagccgtcaagcgcaaccgcacggctgactacactctcaccgtcatcgccatgctggcatattccacaccattgttcttcctgggcctcgttctcatcatcctcttctcacaggtgtggccgatcttcccaccagaagcgccacaagggttcagcgtcggagaagttcttagccaagggcgatcgctcgtgctgcccaccacgacgctcgccatcgtcacgctggccgtgtacgcgcgctacatgcgttcctcgatgattgacaacctcgaggaaaactacatccgcaccgcccgcagtaagggaatcaccgagacaagagtcgtcatcgttcatgccctgcgcaactcgctgtttccgatcatcaccctactcggcatgcagttgccggccttgttctccggtgcgctggtagtggagtcgctgttcaactaccccggcatgggtctgttgttctggcaggcggcccagttccgcgactaccccatcctgctagcagtcaccatcatcatctcaatggccaccgtgctcggcgccctcatcgcagacatcctctatgccgtcgtcgatccgcggattcgttacggaggagcagaccgatgagcaccgagatcgctattcccgatcctcagagccgacgtcccgaatctgcccgtcccatgcgtcccggcacagcgcgacggaccagcagacgcaccagcctcttcaaacagggggtggaggtgttcttcgagaaccgtttggccgtcgtaggatttgtcaccctgcttatcatcgtcgttctgtgcttcatcggaccgtcgatctggcgcaccgatcaggtccacacccagctgtccagcgcttacctccccatctccggcacgcaccctcttggtacggacgcggtgggctacgaccagctcggacgactcatgctcggcggccagacatccatcatcgtcggcctggcagctggcatcctggccaccaccatcggaacgatttggggcgccacagccggattcgtcggaggatggttagacgctgcgatgatgcgaatcgttgactcactcatggctatcccggccttgttcctcttcatgctcatcgccacgctcgtcacaccgaccgtgcccttgttggtactcatcattggcgcatttgcttggctcaacccagctcggctcatccgcggtgagtcgctggctctgcgcagccgggaatacatcgtcgctatgcgtggcatgggcggtagctctctgcgcgccgtacgcactcacgttgtgcgtaatgccatcggcaccgtcatcgtcaatgcaaccttccaggtggcagacgccatcctctacgtcgcgtacctgtcatttctcggcctcggggttcccccaccagcggccaattggggcggcatgctttccgacgggctcgccgaggtctactcgggtcactggtggctgttatacccgcccggggtactcatcatcattctggttgtcgcgtttaacttcgtcggtgacggattacgggacgccttcgaggttcggctgaggagtagatgacatgagcatgtcacagcccgaagacatcttgctgcgtctgcaagatctggaggtcactattgacgtgcgcggtggcagggtcgcgcctttgcggggctgctccatggaagtacgacgcggcgagacgatcggtctagtcggcgagtccggatccggtaagacgatgacagcgctatccatcatgggcctgctcccccacggtggacgggttaccggaggatccatcgtcttcaacggcagggacctcactagttcgccacccgacgagacccggcgcattcgcggtatggacatcgggatgatcttccaagacccgctcacctcactcaacccgacgatgaaaatcggtaaccaagtaggcgaagcgctgagaatccacaaggtggcctcgaagaagaaggcttgggaacgctctatcgacctcctgcgcaaggtgggaatgccacgtccggaaaagatcgtcaatgactatccgcatcagctgtctggtggtatgcgtcagcgagtcatgatcgctatggcactcatctgctcacccagtcttctgatcgcggatgagccgacgacagctttggatgtaacgactcagcggcagatcctcgacctcattgacgacctcaagaaggagttcaacaccgccgtcatcctggtgacacacgatctgggagtagttgcgggccgggccgaccgggtagccgtcatgtatgcgggtcagatcgtcgaggtggcatcgtctaccgacattttcatcaacccccagcaccagtacacgcgctcgctcattgccgcactgcctgagcagaccaccgatacccgtgaggagctctacaccatccctgggatgccgccggacctgcgcgagaagatcgtcggctgcgccttcgctactcgttgcccgctggccactgagatctgcactcagtccaaccctcacatggtcaccctgggcagaaccgacgcgccaagtgccaacaacgaacccgccaaccatgtacatacctgcttccatccggcagggccgccgctgaagcgccgacacgacctacgcccggagcgagacctgtccagccaccccgttgtgtgctcagtgcaagatctccataaaaactaccctgccatgagcagcggcgtcatccggcgtcaaatcgggtgggtacgggccgtcagcggtgtcagctttgacgtctatgagggcgagacactggggatcgtcggtgaatccggttgtggtaaatcgaccttagggcgcgtcatcactgcgttggaaccagcgacctcaggctccgtgtgcatcaatggcaaggatattgctcaggcgtcacgcagggaacgcaccctcttgcaccgcaatgtacagatgatgtttcaggattcctacgccgcaatggatccgcgcatgcgagtagacgagatcctctccgagccccttagcatccaaaaaatcggagaccggcgttcgcgtgccgacgctgcggacaatctcatcgacaagatcgggctgtccgataacgccttgtcgaagtacccgcatcagttctctggtggccaattgcagcggatcggccttgcgcggtcactgatgctagaaccccatctcattgtctgtgatgagccagtcagtgccttggatgtatccgtccaggctcaagtgctcaatctcatgcgcaggctccagcaggagcagaacctcacctacatcttcatctcccacgacttgtctgtcgtcaggtacatgtcggatcgaattgccgtgatgtacttaggaaaaatcgtggaaataggtgaggctaacaaggtcgtcgaccacccacgtcacccgtatacgcgggcactgatcgaggcgatccccgttgctgaccccgcgcatcacgtggaggagatcgtgcgtctgcagggtgaaccagccagtgccatcgacacgcctccggggtgccgtttcaaaaatcgatgcccatttgccaccaacaagtgcgccgaagaacccccgttagtgggcgacactcaccgagtggcctgccacttccctctaccacacgacgtcttggaagtatcatgagccaccccggcgcctatcgaccggtcgtcgccatcgatattggcggcacaacgatgactattgccgaagtccgttccgacggaagcgtacgagatccggtgacaatggacagccccgcacgaatccatggcgacgaagtggtggcccgaatatgcgagcttgtcgagacccgctggccccatccgtgccggatcggcatagggaccgcaggagtcgtcgaccctatcagtggctcgatcggcagagcatccgactccttccaagggtggaccgggtacccactacgcgaacgtctggaagaggcccttggcgtggcggtccaagtggaaaacgacgtcaatgccttcctcgttggcgagcaacggttcggcgcagcggccggggagcgcgactgccttgggatcatgcttggtaccggtgtcggcggagccgtcatcctcgacggacaggtgattcatggtcggcgcggggccgcagccgaaatcggtcatatgcctgcgctaggaaacgatcgatgcagttgtggcgtccccggacacctcgagtcactcgctgggggaagggccatcgcccgacgctgggctgcggccactggacgggatcccaaatccgtcaatggcgcccgtgaggttgcccgccgggcggcaaacggcgatgctgtggcgccgcgaatactcgccgaagctggaaaagccctaggaatcgcactagtacaagccgcgaccctgtttgatctgagtacggtcatcgtcggaggaagcgtcgcaagggcatggcagtggctctcgcccggcctgcacgacgtcgtgacggcgtacccgttgatctccggggctgaattgcgggtgcgtcttgcctcgcttagcgaccgcgcggtcctcataggcgcagccagtcttggggtctgcgacgatcaatggacgaagccatgctgaacttcgacgaacgcaccggcccgaatcagggagtgaacgccccgcactggccgtcggtccaggtgcctcaatggtggaaagatgccaaactcggattcttcatccactggggcttgtactcggttcccgcctgggcgaccaccaatcccgacccggtaccacttgagcaggagtacgcccaccactgctacgccgagtggtatgcaaacacggtgcgcatcctcaactctcccactcgccgacatcacgacagggtatacgggatcggaacgagctatgaggacttcgccgactggtggagccccgacctagatgcacctgccacgctgatccgtcgaattgctgacgccggggccgggtacgtcatcccgacgacgaaacaccatgacggattctgtctgtggcataccgacacgaccggcttcaatgccgctaaacgaggaccgcaccaagatctcgtcaaggccttgcacgacgaggcgcgagcggcaggacttagattcggcgtctactattcgggagcgctcgactggcatgttggggacttcggggcgatcacctctgataccgagctgttcaccttccgccgcaacgaccccgacttcgccaaatactgcgccgctcaactcactgaacttatcgcacggttccgaccagacatattgtggaatgacattgagtggcccgatgcgggcaaggggagtcagccctacgggctcgccagcctgttcagccactacctgaagcaagtacctgagggggtcgtcaacgaccgctggggagtatcccaccacggattcctcactcgggagtaccgtcatgttgacgccaaaatcaacgaaccgtgggagtcgacgcgggggctcggacgttcttttggctacaaccaagaagagtcgacagacgagagccttagtggcaccgagctcgtccagtacctcgtggatgtcgtcgctaaaaacggaaatctgctcattaacgtcgggccacgcgctgacgggtctattcctgaggtgcaggccgctgcaatggccgaactcggacggtggatgagggtgcacgatgaagccattcggggtacccgaccctggggaaacggggtctacggtgaccagcgcatcgtcaagcgtggggaaactgtctacgtccatctgctcgacggggacgcgctccacctccctgacgagctccagggcttcgatgtcagctggatcggcagccagagcaagcagacctctgtgccatgcgagctcgttaaccagccggtcaaggtcgcgaggctcacccggtgaggatggatcccagtcatgtagtaaacaccgaccgcgataggacctcttagttgtgagggggatgggaccggcagagctatctcagtgaagcgattcccgggaggtcaccacacccggagcgcatcccgttcgtccatacgcagcggttgcagctttgagggcgtgtcctccgaggtccaatcgttgcgaccacgtacttatgcataaggtcg

SEQ ID NO: 75 - DNA, 18948 bp, Propionibacterium acnes
  source 1..18948: mol_type = genomic DNA
catcatgccgacgtcaaggatcggcgcggccatccaccggaggacacgctgaggcccgaatgatgagggccgtaggaatctcgactcttccgctgggttccgttccaagggcaagacgggccgcagtttctcccacggcagcgaaatcaagccgcaccgtcgtgagcgctggccgagtggccaccgaatggggatgatcatccatgccaacaaccgagacatcctcgggaaccctcaaccccaacctgtcaagaccagttaagaggccgagagccacatcgtcgtttccacataggactgcggtcacccggtgcgctcgtaccgcccgcgcaacgtgcatacccgtctcgaccgaccacccagtcgccaacggttcgagcggcgggagacctcgggtagccaggacttcgcgccatcccgcacatcgtggatcagggtgccctgcaggaggcactccgacgtaggcgatgcgacggtggcccaaatccgccaagtattcggtggccattaccgcaccggcatgatcgtcgatccacgcccgagaccagggttcacctccctcgggtctgcctccggcaatagcaaccgggagatcgacgggcaacccaggcaggagggccacgctgggggaatcaaattcgaggacgacaaccccgtcagctcgagcgtctaaggcacattgcatggtggaacggcatcgctccggcgaccccgccaatacatgtagggaggtctcgacaccgaggtcgagggctgcgctgagtacccccgaaagcgtcgcccagtagccggtgcggccgatgtcggagacgagaacatgcagccgggcaacgttggggtcggtgcgccaatatcccagctcggtggccgcggtgaggatctcctcggtggcctgtgggagggtaccttcagcgccattctgacgtgccaaggcacgcgacgccgttgccaaggagacgccggagcgctcggcgacgtcagccaaccgcggaggccaccagggccgcctcaccatggccgggtcacgttccatgcaccggacgataccgggttcacacccctgtcctcggcaagggcgtccgcggaagaccagggcgcgacggggccgcatccgcggctgctgaggtggagcgagctggggtggacggaacgggaatcgacgtcgccgatgggctaggaagaggcgaggggatcgtcgtggtaagcgtccagaccgctgccgtggccgaatccgagccctcgatcacccggctgtcagctacgacaatcggcaagccggtgaattttgagtgcagggtacgccccgccccatctgcaagcaggtgccagcgattgaggctgccctcagtatccgacgtcgtccgaagaccggacccgacgacgacctcgtgcttcccagcctcgacgtcgagaccgaggaccgcaccgccaggagtcgaaaggctgtaagtgcagtcgccgtgccgaaccacacaccaagtctgaggctgcgcctgcagagtagggacaccgtcgtgacatgccaagaatcgcccgtccgcgctagtcagccggtagtcgccggactccagtgccggattgggggcgtaccaagcgcgcacgtagtcgatgtcaaaactcgccgggagccgactgacgactggggtccccagatgcccctcaagactgagcaccatgtgccgcgacatccgccacagcgaagagtcgccaggtttcgtctcccaggccaggtgtcggtcacagtaaaatcggagtcgaccgtcgctgcgttcgacgccatacgtgtggtaatcccgcgagatgtcgacgccaaccgggtaggcgtggcctccgaagcgccggtgcgtggcctctgtgttatcgggccacacgtgggtcgcgatgttcatcttcgtgtggtcaaaagtctcctcgacgtcaagctccgggtttggctcggcgccggtaagcaaggaagggccaccgtcgagggcggacgactgcatccagatggccgacagcacccgggcggccgagggcaacaccttggcacgcacctcgacgtaggtgcaaagacccggcacgtcaaagactgactcaacagcgccaaacgtgtaggaaaaactatcgacttgctcggcacgagcagctacatggagttgcccgcctgagaaagacacattcgcgtctcgaaagaggccgcgtcccgagtgtgggtaccacaggccgcgatgccactgggccgagctgtaagtcggatcggtgaattcgtctccaacacccaggagggtccagccagcaaggtcgatatccgcgtcggcggcgatagcccgatcgtggtcggcaaccaccggaacggccgccgtgagaacggcggctccgaggactgatctacgtgtgatcagtgtcatgtgtgctcctttgcaacaactcactccctaactggggttccacgcagcctacgacgaatgaccgcggtcaccacgagcgcgtgaaaacggcctttcatgcgctgtggacggcccttttcccggctcctagggtgaacgacatcacgaacgacggccaatgccggccagccaggagttcaccaccatgcacgatgtcacccctgtcatccagccgtttcggctcacgacggcccccgaccaaccggtcggcttggcagccgggactcttgacggcgcggtgacgcttcccctcgtcgaatgcctcaccctcgaacacggccgatacttcgtcgaccatcgcctcacccagactacggtgggatccggtctgcgtcccgttcgccgcgaaccgctcacctcgccgtggcccggcacccgcgtcatccagcatgatccaggatccgacctcaccgtcaccgtcgatctgtggcatcccacctcagcgaccttgcacgggcgaacaaccgtacataatgacggcacgctcccagtccatctcactgccgtctctgtcatgtgcgccagtctgctgtctggagccgaactcgatgacctcgatatactcatcgcccccagcgcatggatggccgaacaacggtggacccatcaccgcctgtccgatcttctggtggacgtcggcaccgaattgcatggagaatccccgcgcgaccgcttcgtcctatcctcagagtccggttggtcttcaggacgctgggaaccagtcggcttcattaccgacccggcctctggacgcgccgtcggctggcagatcgagcacaacggtggctggactgtcgaattagcccggcgctcttcaaccctcgacctctgcctcttcgggccgaccgaccttcagcaccactggatgcaccagctcaaccctggcgagactttcactacccccacggtgacgttagtggtatccgataacagctggcagggcgcggcagccgaactaagcacctaccgccgtgcgttgaggggcaacaatggcacagcagctccgatcttcttcaacgactacatgaacaccctcatggccgaccctacggccgagcgactctcaaccctcatcccggccgcagctcgcaccggagccgaggtgtactgcatcgacgccggatggcactccgacgacacagactggtgggccgacgtcggtcgctgggagccctcgccccgccgatttcccggcggactgcgccacacccttgatctcatcgtcgcttacggcatgacgcccggcctgtggattgagccgctggcggtcggtctgcgcagtcctctcgtcaatgatctacccccggaggctttcatgcgccgcgcaggggttccgatcgtcgaacagaatcgggtgcgtctagatatgcgcaatccgcaagctcgcgctcacctcgataccgtcatcgaccggatggtcagttacggcatcggctacctcaagattgatgacaatttctctgtcggttctggccccgacgaggacgcggattctccgggggacggtttgctggagcactgccgcgcttgggccgcctggcttgccgacctccctcgacgtcaccctggacttgtcgtcgagaactgtgcatctggggggcatgaccaccgactacgccctgttggcccggacagccatccagtcgacatcagacctccaggattcggtgcgttacccgcccatcgccgccaattcaccgatgacgatgttgcccgaacaagccgccaattgggcttacccacaaccagacatggacgacgaggaaatcgtctttaccgtcacgacctccttggccggcaccttttacctgtccggtcatgtcgaccgcatgaacgcccaccagatggctctcgtgcaatccggcgtagaggtaaaggccttacgatcagatctgaccagccacataccgtggtggccgaaaggccttgccagctgggacgacgagtggatcgtcaccgggcgtcgaaaaaagtcctctcgcgacggggtgatcattgtctggcaccgtcctagcaccgaatcgacggttctcgacttacctgatctggctgggacccacctcgaacccctttacccacctgcctgtctggtccccgacccgggaattcacattgctgactcatcgagctcacctcggctgaattgtccgtctcccaaaccaaccggccgggtcttccgcgtccgggaccttcacgattgcgtcaccgatgtcgcagaaatggagaagaaatgaatcgcaccctcaaggccgccgcagtaggagccctcgcggcattgtgcctcactgcctgctccgacccaggctcagactcgtcgcaatcctcaggaccggagtcatggccgtcagcaaccaccaatctcaacggtgtggagttgacaatgtgggctgcccagtcgtcggcgtcaatccctcaacaggtcgccgcgaacttcaacaaggctaccggggccaagatcaagatcgtcacgatccccgacccctacgagcagagcgtccagaccaaagtcgccaccggtgacgtccctgacctggccatgtggcagccaacgacgtccatgctcacgagcctgggagccaaagagcatctgcaggtgctcgacgacgccccatgggagtcgaagactgacaaaaacgtcctggctgccggaggttctctcgacgggcaccgctacgccgccttcgtctcagccccctcggtcatgggcgtttggtacaacaaagaaattttcgccaagaacggtatccaggtaccgaagaatttcgacgagatgctcaccattgccaagaagctcaaggctgccggccagaccccgttctacgagatgggcggagagtggtgggcctcccagtgggcagtccaggtgcagctggccgacgccgctaaggccggtctgtgggacaaggtcaacaaggacgaggacaagttcaccggcgctgagatccaaggtgctatcaacacctacgacaccatgatcaaggacggtctgttcaattcggacatcgcaaccggaactttcaacgaccaagccaaggcgctgcttgacgggaaagcagcgatgaccattcaagtaacgagcctattgggcaacatggccgcccgagccgacaccgccactctcaacacgaagatcggattcttccccatctctaagtcgggcaccgtggcaacgtcgatacccgaccagaccaacgccgtggtcgccttcaagtcgaaggatgccaagagggagactgcagcacgtcagttcatcacctactggttatccaacgactacgcatccttcatcaaggcacaaaacaccgtttccatcattgatggtgttaaaacacccgattccgtgcccaaagccctcatcgactcgaacgccaccctcaaaggctcggtcggctcgatgcagtctctggctgtcgccaaccccgacttagctaagaacctcggtgacatgatcgctggcacgaagaccccagcacaggtgggctcagaaactcagtctcagttcgcccagctcgccaaggcgattggcgcgaaagggttctgatccgtatgtcctcgacggaagccgcgccgcgacacggcagtgcacaccagtcgcatccctggggattcgtcgtacccgcgttcgccgtgctcgcggtgttcttcctcacaccaacgatctacaacttcatctacgccttcaccgactggtcgagcttcaaaacgaccatcaacccggtgggatggagcaatttctccgatctcatcgcatcaggaagcctgcggaaatccttgattatcacccttatttatgcggctggcgttgccgcgttgcagaatctgttcggactgatgctggccatactgttagagcgcgacaccctcgtcaacaagatcgtccgggtgatcttttttatccctgtgatcctctcggcgctagcgactggttacatcttccaagcgttgctgcgccccgacggcgggctcaaccagatgctcggaatactcacaggatctccggtaaaagtctcctggctgggatcgacgacgtggactctgctcgtgtgcattgtcattcactcgtggaagtggatgggcatgtcgatgctcgtgtacctggccgggcttaagacgatcgatgcccaagtgctcaaagcggcacgcatcgacggggcgtcacggtgggcgaccttccaccagatccgcttgcctctcatcgccccagcggtgacgttcaacgtcgccaccgccttgctagggtcgatgaactccttcgatattgtccaggcgaccaccggcggaggccccggcggctccaccgaactgcttaacctcttcatcttccgaactttcggccagggtctctacgctcaggcgacgacgatgagcctggtgctcttcgtggccgtcgtcatcttggcattccccatgatcgggatgcttcgtcgccgtgagggaaggatgtcatgaccaaacgcatcattcagccacttggcgcggtactgctagccgtgctcgtcgtcgggatacccctgtggacggtcgtcgtcactgcaggaaagtcccaggccgaagcactcatcccggacatgtcattgccacaccactggcaactgtggaccaacgtctccactgtcaccagccagacaaggatcggctgggcatatctgggctcgttgttcctgctggtgccctcggtggtcgtcgtcttgatcatcggatcgatggcatcgtgggtattggctcgacgcaaaggcaagctcgtctccgtgatctacgcgctagggatttcgggcatcatcctgccgccagcggtcgtcaccttggtgttactgctgcgtcagctgggattggctggccgccccatcggaatgatctgtgcctatgtcgggatgtacctgtcgacggtgatcttcttcgtcactggattcgttcgcacgatacccgaatccctcgaagaagccgcccgaatcgatggagctggaccaatgcgcatctttgtgacggtcatcctccccctgctgcgaccagtactggcaactgcgacgattctcatcagcctgtacgtgtggaacgacgtcttctacgccttctttgtcgtaggggccggatggacaccttgccgctgaacttgtttacagtcgccagtgccggggtacacctcaataactggcatctcatcttcacctatgtgctgctcatgagcgtgccgatcgtggtgctgttcattgtgttccagcgcagcatcatttcaggcattacttcgggtgcggtcaagtaacccttcttaccgcctgggaccttcgatcggactggcgaaatctccacaacgctcaaccggtagtgacagtgaggtctggatcctgcatgtcctcgtcgaagggaaagatcggacgacgcagacggttatgacccagacgtataaggtcctggtccacaccgccaggggtgagcgccatgatccaatcggcggccaagtcgtaaaggtccggctcgagatacccgatcttcaccacgactatgtcggtcgtccgagggtccagttgtacccgctcaaactgttccagggtcgtgtactgattgcgccgagtagtcacgatgacgctaagccccccgactcccagcactgccgtacgcaggccgccaggatcgtcaacgaggcaacgcacctgggcactcaggtggacagggccaggcttgcgagtatcgacatgtccccctaaatccacctcaaccatgcccccgacgcccgctttgtcagcacgtttcacgacctgtgggtcatagatggaagcataaatcgcggagagctccccaccagtgatctcgggatgggtcaacaatacagatagcgcaatcgtcacgtcatcagcaccgccggcgcccggattgtcccccgagtcggaaataacgaacggtcgtcgcgatgacgccaccgccctgtctaccgcttcttcgatcccatcggtgggagcgacgaagacgaattcgcgacgcaccttccagaagaactgtgcaatctcgctcaccccgtcgcgtacgcggttctcgtcgtcaccgaacccgacgacggctgccgtgcagcggggctggtcggcccaagcaaagccgatccacaccccgacatcgataacaccgtcgtgagccgccacctcgggcaccatgccgtagagcgaagccgctggttcgagtctggtggacgtcttttcaccgggtaacagaatgggcacggtgaccatcgccttgatcggtttgcccttcccggaacgcagtcgctcgcacaatgtccgagctgccctctcccgtgacacccacgcatcctcgtgcggtgccatccgatagcaggtgagcaggtcgcagcccgcgaagagtttttcagagacgtttccgtgcaggtccatcgaagcgcccaccatcggctcgggaccaaccacgtcgcggatggcgctgatgagatctccctcaacgtcgtcgtaccccggcacgctcatggctccgtgaatgtcgaagaagatgccgtccacatgaccggccttcgccaggccgtcacagatttcggcgcgccacttctcgtaggtcagacgctccacgggtcctcccggcagggctgagcagtgcaggatcggtacccactcaacgtcatggttccatggacgttttgtcggcacatcccactcctcgcctgcgatagcccggggcacctggtctataccggggatcggggactcggtgatccacgggtatcgctccagcagtgtctggccgcgacgctgcgcgaagtcagcggccgtgctcatgtagggggtgaaagtactcgattcaatatgaagtccacaaatggctatccgtatcatcagcgattgccttcctgcgagatgggcatatgagagtcaagtatcgacatgccgatgagcggggcatcggctccgcaagcggaggtctcgataacgagatcctcggtgcacataggcaaacagcgctcgtacagttcactgcgtacgccagcgagcaaagaacccatctgcgacattgagccgcccaacacgatgcgaaccgggttgaggaagttaacaaggttggaaagcacctcaccaagacgcattccggcgtcacgcactaaggaaaccgcctggggatcgccgctgttctcggcagtcaccaactgtgaggttgtggaaatggacgagcccaaacggcccagctgccgtaggatcgcagcccccgatgccaccgtctccaaacatccggagttaccacaggtacacggtagggggttatcggtgtgcacccgcagatgggtgatgtcgccagcaagaccgcgtgagcctgggtaagcgaccccgccgctgacccaaccagcacctatgccggtaccagctttgacgtagatgcaggagtcccggtgccgtccgcgacagttccactccccgattgtcgcggcacgagcgtcattctcgataactgatggcaccgcgagttcctgtgtcaacatgcctgcgatgtctttgccactccacccaggcatccgcgctgccccaatgacgtgaccactaccgtccaccgggccgggtaccgccaaaccggctgaaaccaccgctccagggatctcgtcaccaagcttgtgccaccccttggccaaggctttgatcgtcttctccggaccgatctctatgtttatcttgatgtcgtcggtagcgagtagctcgccctcccgagacgctattgccaaccgggcatgatgctggccaagttctgcaacaaaggcattgccgactgctggtgcaacgcgcaatttagtgggacgacgaccaccggtggaatcggcgcacgcatactcttcaacgactcgcgactcgagcaggtgccgcaccgccgcgctcaccgtggaacgtggcatggacgtgctctcggcgatctcggcgcgagtcatacccggcgtttttcgaagaatcttgatgactcgctgcccaggagcgctgcccagctgatcgtcagtgtgcccattcatgcccgtcgcgccaaggttggtgagctcaatatctgtcatcagcttcctcaatccgtcatcgtgcctgcccgacgtctcggcccacagtatgcccgcgtccggagatgtgtgtagcaaaagtgataaaagctagattattttacattcgaagcatccgaagtcatcaccttgcgctactcttacggtagtaagggtttatcccaccaggcaacggaggctgagagaactcatgaagaaaccacgaaagagactgcttgtggtgaccgcagcggtggcagcaactctgttggttgcctcgtgctcgtatggcagtggcgaccccagtcggtctaagacaagcggcggcgcgcacgatggcaacgtatccttcgcgaccaccacgcccaactggatcctcccggtgtccgcacccggaaagacgcagggtgagaacgccatgttcacccagctcatctaccccgccttgttctcctacaagctcgacgcgaagaacgagttcaacatcgatgaacgccactcggtggccaaacccccaccgtatccgacgactcactcacctacaccatcacccttaaggaccgcacatggagcgacggcgtcaagctcactacgcgcgacatggagttctggtggaacatcgtcaccaacaacaccgacaagtgggcgtcctaccgcaaaggccagttccccgacaacgtcaaggctttcaagatcattgacgacaaagccttcaccatcaccacgactgagaagtacaacccggcatggttcatcaacaaccaactgaaccgccttgtgccaatgccagcccacgcctggtctaagaccagcgactccgacaagcccggtgagaaggaccgcacccctgccggagccaaggcaatcttcaaatacttgagcgccgcctcggagaacttacagaactacgacaccaacaagctctggaagacgactctcgggcccttccagctcggcaagtacaccccgaacggtgaggccaagctcgtcgccaatcctagctacgacggtgaagacaaggcgagcatttcgagcttcaccatgcagccgtacaccagtgacgacgctgagttcaacatcctgcgctccggaagcatcgactacggcttcatcccacccaactcgatgacccagcaaaagtacatcgagaaacagggctataccgtcaaaccgtggtacggctggtcgatcacctacatgccgtttaacttcaacaacccgaagtccggcccgatattcgcccaaaaatatatccgtcaggcgatgcaacacctcattgatcaggaaggaatctccaagatcatctggaaccggactgcatcccccacctgcggtccggtaccccagcaacctggcaccgccggtagctccaaaggttgcgcctacgactacaaccctgcgaaagctgagaaactcctcaaagaccacggttgggatatcactaaggacggagtcaccacctgtcaacaagccggggagggagaaggccaatgcggcaaaggaatcaagcagggggccaagctttccttcaccgtgatctcccaatccggtttcacctcgaccacccacatgttcgccgaactcaagtcgagtttttccaacgtcggtatcaacttggagatccgagaggttcctgactcggtggctgagtcccaagcctgtaagcccaacgacacgaactgcacgtgggacctgtcattcttcggttcgcagtcatcgtggtactacccggtctacgcgtccggtgagcggctcttccaaagcggtggcccggtaaacctgggcagctactccgacaagaaagccgacgagcttattgacgcgtccatgcgttcgaacgatcgggcagccctcaaaacgtacaacgactatctggctgaagacctaccggtgttatggatgccgaactcggtcaatcgcgtctcagcatggaaatccaacatccaaggaatcgatccacaggaccccatgctttacctgtacccgcaggactggaccatcacatgacctcacgcagggtgaagccacgttactgatcccgcccatttcacacggcgtcactgggcgccccggtgacgccaccccaacgtcccaatcacccatctacaggagggagcaaaggatgacgcgatacatcgcgcaacgcgtttttcaggcgctgatagtgctgttgctcgtcacgcttatcactttctccatccttcacgcacttccaggcggagcagctcgctcggctttgggactggacgccacccaagcgcagatcgacgcatacaaccaccagatgggttacgaccaacccttatggaagcagtacttcggctatctgatccagatcttccatggcgaattcggacactctttccgactcaacatgccggttgccgacgcaatcggtcagcggcttcccaagacgattgtcctcagtctcatgtcggcagtcctcgccatcctcctcgcgatccctatcggcgctatccaagccgtcaagcgcaaccgcacggctgactacgctctcaccgtcatcgccatgctggcatattccacaccattgttcttcctgggcctcgttctcatcatcctcttctcacaggtgtggccgatcttcccgccagaagcgccacaaggattcagcgtcggagaagttcttagccaagggcgatcgctcgtgctgcccaccacgacgctcgccatcgtcacgctggccgtgtacgcgcgccacatgcgttcctcaatgattgacaacctcgaggaaaactacatccgcaccgcccgcagtaaaggaatcaccgagacaagagtcgtcatcgttcatgccctgcgcaactcgctgtttccgatcatcaccctactcggcatgcagttgccggccttgttctccggtgcgctggtagtggagtcgctgttcaactaccccggcatgggtctgctgttctggcaggcagcccagttccgcgactaccccatcctgctagcagtcaccatcatcatctcaatggccaccgtgctcagcgccctcatcgcagacatcctctatgccgtcgtcgatccgcggattcgttacggaggagcagaccgatgagcaccgagatcgctattcccgatcctcagagccgacgtcccgaatctgcccgtcccatgcgtcccggcacagcgcgacggaccagcctcttcaaacaggggtggaggtgttcttcgagaaccgtttggccgtcgtaggatttgtcaccctgcttatcatcgtcattttgtgcttcatcggaccgtcgatctggcgcaccgatcaggtccacacccagctgtccagtgcttacctacccatctccggaacgcaccctcttggtacggacgcggtgggctacgaccagctcggacgactcatgctcggcggccagacatccatcatcgtcggcctggcagctggcatcctggccaccaccatcggaacgatttggggcgccacagccggattcgtcggaggatggttggacgctgcgatgatgcgaatcgtcgactcactcatggctatcccggccttgttccttttcatgctcatcgccacactcgtcacaccaaccgtgcccttgttggtactcatcattggcgcattcgcttggctcaacccagctcggctcatccacggtgagtcgctggctctgcgcagccgggagtacatcgtcgctatgcgtggcatgggcggtagctcgctgcgcgctgtacgcactcacgttgtgcgtaatgccatcggcaccgtcatcgtcaatgcaacttttcaggtggcagacgccatcctctacgtcgcgtacctgtcatttctcggcctcggggttcccccaccagcggccaactggggcggcatgctttccgacgggctcgccgaggtctactcgggtcactggtggctgctatacccgcccggggtactcatcatcattctggttgtcgcgtttaacttcgtcggtgacggattgcgggacgccttcgaagttcggctgaggagtagatgacatgagcgtgtcacagcccgaagatatcttgctgcgtctgcaggatctggaggtcactattgacgtgcgcggtggcagggtcacgcctttgcggggctgctccatggaagtacgacgcggcgagacgatcggtctagtcggcgagtccggatccggtaagacgatgacagcgctatccatcatgggcctgctcccccacggtggtcgggttaccggaggatccatcgtcttcaacggcagggacctcactagttcgccacccgacgagacccggcgcattcgcggtatggacatcgggatgatcttccaagacccgctcacctcactcaatccgacgatgaaaatcggtaaccaagtgggcgaagcgctgagaatccacaaggtggcctcgaagaagaaggcttgggaacgctctatcgacctcctgcgcaaggtgggaatgccacgtccggaaaagatcgtcaatgactatccgcatcagctgtccggtggtatgcgtcagcgagtcatgatcgctatggcactcatctgctcacccagtcttctgatcgcggatgagccgacgacagctttggacgtgacgactcagcggcagatcctcgacctcattgacgacctcaaaaaggagttcaacaccgccgttatcctggtgacacacgatctgggagtggttgcgggccgggccgaccgggtagccgtcatgtatgcgggtcagatcgtcgaggtggcatcgtctaccgacattttcatcaacccccagcaccagtacacgcgctcgctcattgccgcactgcctgagcagaccaccgatacccgtgaggagctctacaccatcccggggatgccgccggatctgcgcgagaagatcgtcggctgcgccttcgctactcgttgcccactggccactgagatctgcactcagtccagccctcacatggtcaccctgggcagaaccgacgcgccgagcgccaacaacgaacccgccaaccatgtacatacctgcttccatccggcagggccgccgctgaagcgccgacacgacctacgcccggagcgagacctgtccagccaccccgttgtgtgctcagtgcaagatctccacaaaaactaccctgccatgagcagcggcgtcatccggcgtcaaatcgggtgggtacgggccgtcagcggtgtcagctttgacgtctatgagggcgagacactgggaatcgtcggtgaatccggttgtggtaaatcgaccctaaggcgcgtcatcactgcgttggaaccagcaacctcaggctccgtgtgcatcaatggcaaggatattgctcaggcgtcacgcagggaacgcaccctcttgcaccgcaatgtacagatgatgtttcaggattcctacgccgcaatggatccgcgcatgcgagtagacgagatcctctccgagccccttagcatccaaaaaatcggagaccggcgttcgcgtgccgacgctgcggacaatctcatcgacaagatcgggctgtccgataacgccttgtcgaagtacccgcaccagttctccggtggccaattgcagcggatcggccttgcgaggtcgctgatgctagaaccccatctcattgtctgtgatgagccagtcagtgccttggatgtatctgtccaggctcaagtgctcaatctcatgtgcaggctccagcaggagcagaacctcacctacatcttcatctcccacgacttgtctgtcgtcaggtacatgtcggatcgaattgccgtgatgtatttaggaaaaatcgtggaaataggtgaggctaacaaggtcgtcgaccacccacgtcacccgtatacgcgggcactgatcgaggcgatccccgttgctgaccccgcgcatcacgtggaggagattgtgcgtctgcagggtgaaccagccagtgccatcgacacgcctccggggtgccgtttcaaaaatcggtgcccatttgccaccaacaagtgtgccgaagaacccccgttagtgggcgacacacaccgagtggcctgccacttcccactcccgcacgacgccttggaagcatcatgagccaccccggcacctatcgaccggtcgtcgccatcgatattggcggcacaacgatgactattgccgaagtccgttccgacggaagtgtgcgagatccggtgacaatggacagccccgcacgaatccatggcgacgaagtggtggctcgaatatgcgagcttgtcgagacccgctggccccatccgtgccggatcggcgtagggaccgcaggagtcgtcgaccctatcagtggctccatcggcagagcatccgactccttccaagggtggaccgggtacccactacgcgaacgtctggaagaggcccttggcgtgacggtccaagtggaaaacgacgtcaacgctttcctcgttggcgagcaacggttcggcgcagcggccggggagcgcgattgccttgggatcatgcttggtaccggtgtcggcggagccgtcatcctcgacggacaggtgatccatggtcggcgcggggccgcggccgaaatcggtcatatgcctgcgctaggaaacgatcgatgcagttgtggcgtccccggacacctcgagtcactcgctgagggaagggccatcgcccgacgctgggctgcggccactggacgggatcccacatccgtcaatggcgcccgtgaggttgcccgccgggcggcgaacggcgatgctgtggcgcgcgaatactcgccgaagctggaaaagccctaggaatcgcactagtacaagccgcgaccctgtttgatctgagtacggtcatcgtcggaggaagcgtcgcaagggcatggcagtggctctcgcccggcctgcacgacgtcgtgacggcgtacccgttgatctccggggctgaattgcgggtgcgttttgcctcgcttagcgaccgcgcggtcctcataggcgcagccaatcttggggcctgcgacgatcaatgaaagaagccatgctgaacttcgacgaacgcaccggcccgaatcagggagtgaacgccccgcactggccgtcgacccgggtgcctcaatggtggaaagatgccaaactcggattcttcacccactggggcttgtactcggttcccgcctgggcgaccaccaatcccgacccggtgccacttgagcaggagtacgcccaccactgctacgccgagtggtacgcaaacacggtgcgcatcctcgactcccccacccgccaacatcacgacagggtatacgggatcggaacgagctatgaggacttcgccgactggtggacccccgacctagatgcacctgccacgctgatccgtcgaattgctgacgctggggccgggtacgtcattccgacgacgaaacaccatgacggattctgtctgtgggataccgacacgaccggcttcaatgccgctaaacgaggaccgcaccgagatctcgtcaaggccttgcacgacgaggcgcgagcggcaggacttagattcggcgtttactattcgggagcgctcgactggcatgttggggacttcggggcgatcacctccgataccgagctgttcaccttccgccgcaacgaccccgacttcgccaaatactgcgccgctcaactcactgaacttatcgcacggttccgaccggacatattgtggaatgacattgagtggcccgatgcgggcaaagggcgtcaaccctacgggctcgccagcctgttcagctactacctgaagcaagtacctgagggggtcgtcaacgaccgctggggagtatcccaccacggattcctcactcgggagtaccgtcacgttgacgccaaaatcaacgagccgtgggagtcgacgcgggggctcggatgttcttttggctacaaccaagaagagtcgacagacgagagccttagtggcactgaactcgtccggtacctcgtggatgtcgtcgctaaaaacggaaatctgctcattaacgtcgggccacgcgctgacggctctattcctgaggtgcaggccgccgcaatggctgaactcgggcggtggatgagggtgcacggtgaagccattcggggtacccgaccctggggacacggggtctacggtgaccagcgcatcgtcaagcgtggggaaactgtctacgtccatctgctcgacggggacgcgctccacctccctgacgagctcaaggtcttcgatgtcagctggatcggcagccaaagcaagcagacctctgtgccatgcgagctcgttaaccagccggttaaggtcgcgaggctcacccggtgaggatggatcctagtcatgtggtgaacaccgaccgcgataggacctctacgcgataggacctctagttgtgaggggatggaccggcagagctacctcggtgaagcgattcccgggaggtcaccacgcccggagcgcatcccgttcgttcacacgcagcagttacagttttgagggcgtgtcttccgaggtccagccgctgcgaccacgtacttatgcataaggtcg

SEQ ID NO: 76 - DNA, 13940 bp, Propionibacterium acnes
  source 1..13940: mol_type = genomic DNA
agcaagcacggcaccaaccgggtgatctttcagttgtgccacggcttgacgatgcttctcgtcgagacggacggcttcggtagcctgcaacgcaccgagcacaacccgctgggacgccttgccccacgcctcgaacacctcgtgtgcagcctccgggtccaccgcgatgttccattcacttgtcggcccggtattgccacgataattgatcgccccacccatgacgtgcagcccccgcaacaaccgcggcaattccggttcttcccgcagcgccagcgcgaggttcgtcaacggcccggtgacgatacccaccaacttccccgggtattggcgcgcgagatcaacccacagttgtgccccgctacgcgaatccgggtgacgcccgcactcccctagcacagcgtgccccaacccgtgcggcccgtgggtctcctcggcggtcatgagaggctcgacgagcggaacgtccgcccctcgggcaaccggcacgcccattccgagcagatcagtcaccccaagcgcgtttcgcagtacgtcgtcctgccccacgttgccggcagtcgtcaccaccccgacggtctcaacgtcgtcacggcaggccacgtaggccagggcgaaggcgtcgtcgatacccggatcgcagtccaacaagacgggcagggagcgcgtagaagtcgacatgtcgccacactaaggcttcgaccgttgtggcgtcaccctccgatgcgtccaccaaacttgtagcgggattcatgaagaagcgccgcggaacagaccgtgctccatccccgcgatgatgaactcaattttgagatcgagattcccgcgctcccccatgtcctgcattccgaatagttcgggtagctctccagcgatcctcacaaacttgtccaatccggtgcgaccttcttcatcacaggtcatgtacggctggaccgacatgtacgtctccaaggccgtgtcccccgcgaagtccagggcgaaggctgccccttccttgcccccggggataccgagtgcggccaacctctcaacgatcgccgtgattcgcggtagagctactccgaaggcttcaggccgggtgacaataacggcggccgcctccggatagcggacacacatctgccactgccgatccacgacatcgcgcagcacgtcctgccaggtgcacaactgcggatccggttcgatgtcggcagctatcgcgctgatcgcggcaagctgcaactcctgacgggaactgaactcccggtacaaggcagtggccttcaccccaaggcgctcggcaaccgctcgaagagtgaaactgccaattccttcagctagggtagcgtcaatgacctgacgtcgtgtgaacgcaggtttacgccccggccgttttctcatcacggccgacccacgagcgaccaccccacagcccgttcccgggcatgccacagatcggcatacaggccgctgctggcaatgaggtcgtcatgggttcccacttgacaaaccctaccagtgcgatcgacgacgactatctgatccgccgaacgaatggtgtcgagcttgtgggcgataacgacgattgtcgacgtctgccgcagctgggtcacagcggcctcgacatgggcctcgttctccgggtccaaagccgaggtggcctcgtcgaaaagcagaatcggggcgcgtttgagcaaggcccgagctaccgacacccgctgacgttcgccacccgaaagccgacgacccccttctccgacgctggcatcccaaccgcccggaagacgatcagcaatctcgtcgacaccggccagggctccggcctgacgcacgtgctcatcggtggcgtccgggcaaccgatgcggatattttccgtcagggtggagtcatagaggtacacatcctgaaacaccatggcaagctgactcatgagctgctcagtagtctgatcgcggacatcgaccccaccaactcgcaccgttccggaatcagcatcccagaacctggcaatgagccgaaacagagtggacttgccagcgcccgagggtccgacgatagccgtcaatccgccggccggaacagtgaacgagacgtcgtggaggaccgggcgagcctggtcgtagccgagaggatctcgtcgacctcggcgaccggttcacgcgcagtctcgacggccagggtcgcagcaccgacattctccaacaccttcgtgtagcgcagcgaaaccccgacgaaagccaccgccacgaccgggttcaacgccccgatccgcccaggttcgcggcgagcacgatgagggtcacggcaatgccctgggccgtcaacccgaagacgaagctcgccaacactcctagccacagatccttgcgggcagcacgtctgctggccacctgggcatcatggagaggttgatagccggtggcacgtccagctgcccgcagtgcaggttgagattcacagaactcgactattcgggccgccaattcctgctccgtggggtacgtcaacgcttcaccgcgaagtttgagggcgcgtgaggcgatcgtgaggaggtacatggtcggaatggcaaggagcagggccaaccccaactgccatgaccacatccagcccaggaccatcatgacgagggtagtggtcatgcccttcaccagcggagcggtgaagtgtcccaagcactcgcctagcgtcatgagtccacgcgtcaacaggcgcgagagacgggcgggaaaactcggccgaaaccaccccagcggcaggctggcgacgtgatcaccgatacgggtactgaggtgactcaggatgtctatcgcgcatagataccccgtgctcgactgaaggtacgacaccacagccccggcagcggccagagcagcgagcacccacacccagccccaccaggcaaggcccaacgagggctgccccgcaacgaaagcggtgaacgtcgggatgacggcaaacaggccgactccctcgatcgctcccagcacaccggcccacaccaaggaactgtgcaaccgccgggtgccctcgttggtcaacaatggttggaacgcccgcaccaggaggatgtccccgacccaagaaagacgtgacgacgtggtgctcatcgggtgactccctccatgattcgtcccgccgacagccgcgcccagtagggctgttcggccagttgctcggcggtgccgcaggctgcgatagagccgttctccatgacgcagatgacatcagccccaatcaccgactcggcgtgatgaccgatgaccaacacggttcggcctcgagccaaagcggccagggcctgctggatctcggcctcgcagtctggatcggtggccgcagtcgcctcgtccaggacgagaatcggggcatcggccaacacggcccgcgcaatggacaggcgctgcttctgcccacctgacaagttggtgtcctcacccaggacggtgtcgaaaccggcgggcagggcatcaatgtcgtcgaggattcgggccgtgcgggcggcattgcgaacttgttcttcggtggcatcggggcgagccagggtaatgacgtcacggatggattgacgctgcaagtatgggtcctgcaagacgaaggagacgagtcggtaaaggtcggtcggggagagctccctgaggtccaccccaccgatgcgcaccgtgccgaaatcaggatcgcggaatcgggccaacatcgtcgcgagggtcgacttgcccgacccagacgggcccacgagggccgtgacagtgcccgggcgcagtgtcagagagacgtggttgagggccggaacctcgccgtcaggggtgtggtaggagacgctgatgtcgtcaaaggtgaccgtcgtgtcctcgggaatcgcggagctggtaccaggctcgtcgatctgctcgatagacaggacctcctgcagacgcaacgctgcaccaccagcttgctggtacatccacgccgtgcttccaagcacctcgacggtgcgcggcagcacgagggcgataagggagcaggtgagaacatcggcgacacccacccaaccggccctggccatgagtagaccgaagccgaggttgatcgccatgagcgcaggcaccgagatcaccgactgcgatagggcggacgccttgatgagcgggccgcaccagtcccagtaaaaccgggcgaactcctcgcaggcagtggtgaagcgtcggtgggccttgcctgtctgaccgaagttcttgacgacgtggatgccctcggtcaactcgatggcgttggccgagatgttggcaagtttgtcgttcatctcggcggtcttggcggtcatgccccgcatcgaccaccactgcaacagggcatagatcgggaaagtcgccagacagagcagacccagccgccaatccactacgaaggcgtagacgagcagtaccacggggatgccgatcgccgcggtctgctccaccggggcgtgggcgacaagtgcatgcacctggacggtgtcgtcctggatggccttacgcacctgcccggtggacgacgaactgaaccatgccagcggtgcccgggacaggcgcccgatgatgcgaccctgcaggacactgcgcagtttgaggtcagcgaaatgtgtgatgacaacggctagcacgtagagcagggcctgggtgcagaaggccgccaccaacaggttcgcggtatgtacgagggcctcgtggtcgatatgggcgctcagcaggatggtgccgagcttcaccaaggccagatagggggccaaggcgacgacgcaggaggcgatgacgataatccgcgccgccaggattcgtccccggaccggttgcataagcgatgagagggctctacccccggcgcggtgcttggcctgatagtcgtgggaactttcggcagatgcagtttcctgggctgccacggaggctggaggcgacggttgggacgggccaacgatggaggcaggatcccccgaggtggttctgctcacttcgtcagtcccgcccgccggaagtgtttgcgccccaccttgatgcccagccaaccaccgagaagtccaagcaggaacaccgcgacggcccatccggcgaccagaccgggggtaaacagtgctcgcatcttgttggaataatcggcacccatttgcttggtgatcatggcgtagtacttgtcggcgttcacgaccatcggtatcagtggcgcaaccacccaaagggtgaataccgcatagccgagggacgcccggcgcgggtccaggcgaacgttacgcccggcgttggtggtgaccagatcggcgatgaagccgagcacgagcccggcgggaatcatccagatagtgtgcccgggcatcataccgagtccgacgagcagcccggtgatcgtcaaagcgcccattttcgggacccgtgccattgacagcatcacgatgatcccgcccagcagaataccgaggatccagccaacgaacatgaacgccggcccggcgaaaccaatcatcccgcaggcgtagaaggcgacgaagaaaatcaccgcgaaaatggctacggtcaccagatcacgagtggtcaggcgtgatttcatgatttccctttcaaggtggcgatattgaccagaaagtccccgcaccgggccatgagctccgggtcgtgggtgatgacgatgacaaccttcccggcggtggcaagttcaccgacgagatcggcgatcgacgcgagatgtcggcgatcgacacctgaggtcggttcgtcgaaaatgacgacctccttgtcttgcgcgatggtggccgcgacgacgaggcgttgcgcctgcccacccgacaaggacaaggggtggcggtcatgttcgccagccaggtcgagacgtttcagaagtcccgatacgtcggcggcatctcgatgcggaagatccagtccgagggtgacttcacgttctaccgactcgctgaaaagctgacggcgaacgtcctgcatcaccatcccgcaacatttctgacgcctgccgggggtccagggcactcccatgacgatgcgagcttcggtaggggatttttcgagcccgcacacgattcgggccaaggtcgacttccccgcgccattcgggccggtcagaatcgtcaccgccccgccaggcaggaacagggaatcgatgtcgagaatcgtcgagccgggacggtaagagaaggcgaggtgctcgatggtcagccctgccgggatttttgtgcagccggctgaggcgggatcggagcgcatgaacttgcctcggggcaccggagtaagcggagccggagcctgcggcggcgccggcaggtcgaccgggttgacgtcgagactgcgcaagccccgttctagcaagtccccctctgtcagcgcgaaaaggctgctgccgctcattcgctcaacgatctggccattggaaacacgatgcacgtcgtcaacaagtccgcggaacagatgcagccggtgctcagcgatcacaagggtcttgttggcagctttgagctcggtgacgagagcgcgaaaatcgtcgatcccctcagccgagaggttcaaggtcggctcatcgaaaagaagcaggtcgacatcagccaccagcgcgcaggcgcaggcgacccgctggagttctcctcctgaaagggtgtcgaggtggcggtcgagcaggtgagagataccggttcgggaaaccgcacgggagacagcttcgcggatgtcaaccggatcgaccccatagttctccagcccgaaggccagctctgtgcgcacgctggaggtgaagaactgggtacggggattctggaaaatcaccgcggaggtgcggccgacatcgtgcagttcgacaccggccaggtcagtaccttggaccatgacgtggccgcgcaacgttcccccgaagaattgggggacgagtccattcatcgtccgcaatagggtggatttccctgaccccgacgctcctactagcaaggtgagggtgcctggttggatcgtcatcgtgatgccacgaagctgttctacgaactcccgctcgggggccggaccgtcggagaacggcgaggagtcggggtcgaacgaggggtagccgtagctgacgccgttgaggctgacgatgctcacacaatcacctcgctaacacgccacacaaccaacgcggccaaaatcgtcagcacgagggcgtcgccgacacgaaaacgactcggctgggtgttcgatcgggatttttgtgcaccgagtcccttgatgatggcggctgcggaaagttcgtcggcgatgcgggcagccgaggccaggaagggaatgacgacgtactctcccgtacgtatcgggtgacgcacagccgaccgcgccccagggttgaggccgcgcagggtcatggcctggacgattgctcgcagctcgcgtactgccatcgggaagaaccgaaccaccaccatgacgggcacataaatgacgcgcggagcatgcaattgggtgaggaccgcgccgactcgagtgacgtcgaggactttgatcgccgctactgccgcaccaaagactccggcgaaccgaaacatccagaaggcgatgaagaccaggaacgccgatactgtcgagcgccacagcactgggagtaggaagcagcagaaaatccacaccagcacgaagatcgtccagctgatccaggacttcgaccgggtagtcaagaccaagaacacccacaccactccaagactggtcatcacgagggctgttgatcctgctcccatgagtaggacgttgagaacgatgacgtagagggcgagggtgcgtggatccaccgcgccgaagagctgccgagatcggcgagtgtggaacgccgaagcagcatcgaaacctatcccggcaaccgagcgactatggggaacgcggtgagtggctccgggcagcgccagggtcgcctcatcatgtttcataaggtaaccctatctcataactgattgctgttaacaaataccttctctcccacgttgacccagagttggccatgatggcgccatatgagctccctgccaccacgtgaggcacgatggaggggccgacgaccagttaccgaagaacaggtgtgagcatgactgacgtggagaagtccccgactcgcggtgagaggattctcgccgctgtggtcgccttcaccctctggatggccgtgatattcgcgattgtggcgatcttcgtcggctggcggtggtctctgcggatgttcgtcggggtgctcctcatcggtatccccggagagatcgttatggagctcgtcggtcggggaccgttgctgccgagcggcgcgtcgagaatacggcgttcccgtggttcgcggttactcctctcggcactcatccttatcgtgtgggcgttcatcgttctcgcggcgattgcgctcattcagccctggtacggcgctaccggtgacatggcctgggtgatggtcgtagggatcgcggcgatcctcgtgcaggagggcaccgacacccgcaagaagaagtcctgatcatctctcatgaagggcttgtcggctcctcgcatacaagggggtcgatagtggtggccggaacgtgcgggtttgatctcgccacaatcatggataccgccagctttggtgtccgtccctgccacaaagcatcacaaaagcatcggtttacacgtcagcatcgctgctgcggttgatcgtgaggccacctgagaccattcagggcaggctcacccattcccttccgatttacacctcgtgcgaactcgcaccgcctacaattccagagcaacgacgcctcatccccgtcgccatagtcaggaaaacactgatgatgcccagggtccgcccgtgacgaagaagagctccctcgtcctggcgatggcgtccatcggtgccatcgctgttgggctgaccgggcgtgctcgtcagctcaccctcgccttcaactccgcgagttggctcgtcgccgtcatcgcgctgagctatctcatccgctccgggcacagcgaaaaaacagcatggctggcccaaccaccgagggtgcccgaggcacagccgccaggcggttgacggtctcctcgacgtgcattctcacaccatcgcacggcgaacatccaccgatccgctgcccaagcacggctaccctggaactcagttgagtgagaggagacccgcgtgggcatcggaagcaacatcggcaaggcactgttggcccaagcccccgacatggcacccggcgcagctgtctcactactacgcagcatcctcggattcgctatcgacggcgcctcagggctgccgggagcgcgtcaggctgccggcaagacgctcaccaagcacgagggcgatattgagcaggcgatcagctccttagtcaatcagcacattgcgatggccggggcccaggggttcgtctccaacctcggtggcgtcgtcactctggccgtgactatccccgccaatatctccggcgttgcgatcgtgcaagcccgcatggtggctgccatcgcccacctgcgcgggtacgatctcgacgaccagcgggtccgcaccgccatcctcgccactctcatgggtcagcgcgaggtcgatagcctcgtccacgaggagaagctaccgacgacaccgatgggcatcgctaccgctccagtcggtgacgccgatctcgaaaaggtcgtcgcccggaacctcgtcaatgtccttatggggcaggtcgcaggtaagaagctgcctgtgttcgtctccaagcgcgttcctgtacttggcggcggagtcggtgccaccgctgacggattcaccacgtggagcgtggcccgctacgcccgtaagcaattccccacccgccgtccacgcacctgagacccgcacactcgggatacggccaggacgattcgggggcaggaatagtggcgtccgaccacagtgacaggatctggccgggattcaacgacgcagggatttcaccccgcccagcccccatgcgtacccgacaacacctaggaaggcacaaacgacggcacacaccatggccatggtagacactgtcggcgcactcccctcgacggcggccgtttttcctggatagccgccggggaggaatcgcaggagggtcttcgactgtgcgacgaccacaaccaggtagatcaggggaccgcacaatggcccgactcgccgtgacaccattcccgtgacgaacaatgcgataccggtacacagcacgcaagtcaccgagaaccctatgaatggcggccacggcagctgaaaccgtgcgggaatttgcggtaccaggacggaatcaccatcaggtatcaactcaacgggcaacgatcgcagtacccatcctatgagcaatggaagaccagctgcacagccgcatatccacagccccatccacgcatatccaaccgtgagggaccgaaccgatgtcctctcgacccaatccatggccgatgagacacaccacatgatggtggcacaacccaccagaatgatcagctcgggaccagtcacagggcgatcccacacgtctctcggcgccaccgacagactcgccttccacaggaagaaggccacgagcaaggccacaagcggcgcaatgacaagggcactagcatggcgccccttcaggaaagtcgctacgcctctcatcggtgaagatcactggaggtcaatgaacacgtgcttaccgcatgatgatgctccgtataccaatgacggaatgcggttacatccatgccgtcaaggccatttcgttccgaactcgtcgcatcatcatgctgaaatccagccagccgaagaatggtacgttccacggaatcgacgccattgagggcccccatctgctgagatgtcaactccgaccctccggtctcacgcataaaagcacatgcgtcccggcctgaaaatgattgagccagcccctcacccgtcagatccgacatttgttgtctagagccatgtgaggtcggtcggccgagatcaatcacacgttgccccctgtatgtttggtacccagactcagcaagcaggacgtcacgggaaaccaccgtttgcggcaggacagacaagacgcgttgagcgggtttcgcgtaggacgccgcgagactccgatgtgctggcgtgacgcatacccgcacaccttcgtgcgacgaacactcaaaggctagtggcgcatcacgaaacaacggcaccggcaagacgacgcccacggcagcaatgatgagcggtggggcgatcaaggccacacaaggcatcactcgacgccagcagaacctgtcggcacggaccctggaccaacggctggcggtgaggatacaggacaaggtgacgatgcagaagaagatggcgcgcatgaccacggccgcgaccgtgacggtgtgggtgccacccggttccgacattcctaaagaccatgcaaaggtcaccgagccatgccccgtgttggcaaggagatttccgttgacgacgatcggcatttcgaccaggacgatgcacacaacaggtgccaccagccacacgatggggtgggacaccatcgcggccacgaggtgagcaacggccaccaaagccgcgaatgacagcaggacgacgattaagtcggaggcttcggcgacggtcggagtcgcattgagccacgtcttagcgaccagcggggccgccacgatgaccgtcccgatgaggagggcagccgcctgccgccagaaccagtgccagtgaatgccaagaatggaccgcgccggagcaacccccacaaccatgtccgaaggtgccgtgcgtgccgctaggcccgcccccatgaggccagccacgatgccccacagcatactggactccaggagcgtgacggcgacatcctgcacttgccacaacccccaagcccatcgacctcgcaacgcaatgaagctgcacatggctcctccgaccgtcacgagaaccatgtgccatgacgtgaaggggaatgccatgcggtgaaaaccgcgcagcggacgtataccctgaagcgaagtgagcatcacgctgcgcccccgagaagagtgaggtatccagcctcagcatcgttggtattacggactgggtgccctcggccaacagattccagttcggaatacgagccctcgaagatcagctttccctcggacaggacgacgagttgcgacacgaagccctggagatcctcaagcaggtgagtcgacacaatgaccgtccgatcttcggcgagctcaccgaagagggatcgcaccccaatccttgatgccgggtcgaggcctaccgtcggctcatcaagcagtagtacagctggatcgccgacaatcgcacacgcgattccaagtcgttgacgcattccacccgacagggactggacgcgctcatcggcgcggtcaagaagcccaacacgatcgagggctgcacatgccctcgcacggcattcgctcggttcaacgtctcgcgcccaggccgcatattccaccgcccgccggatacggaagtgcgacgggagggaaaatcgctggggcaggaatccgaccaaaccacggatggtgtcgacgtcatcgctgacatcgacaccattcacccgaaagtggccggactccggttcacggagtgtcgcgaggatactgagaagtgtcgactttccggccccattcggaccgagcagcccccacaaaccagagccaaactcacaggaaatatcaaccaggctacgccgatggcggtaacggtgtgatacgtgcttgagttcaatcattcacttgaccgtaacgtaacccaatttcgctgatgccatacgacgccctttctgaagcagaaacatctccaatggaaaacccgctaccgcatccatactttcacttaaagtgaggcagtgtcaatcttgtggcaaattcggtggcacatatcgcgctcccgcaattcttctcagaatcgggtcagtacagcattgccgacgccgggtcagagaggatctccgcaacgtcgtggaggaatgtcgaaccctgctcaccgtcaataagacgatgatcgaacccgaggctcatcgtcgtcacccacctgggcacaacgcgctcgtcatcaccggtcccgacgacccacggccgccgagcgagagcaccgagcacgaggatcgctgactctgtccggttgaccacgggagtaccggcatcgagcccgaacaccccgacgttcgtgatcgagaaggtaccgtcggcatagtcgggcggttgcagtttgtcttccttggcgatcgcaacgatccgggtgatctccgtcgccaactcaagcatcgccatgtcctgggcgtcgcgcaccaccggcaccataaggccgcgaggcgtggcggcggcaatgccgaggttgatgtggtcacggaagacgatctggtcagcggcgtcatcccatgcggcgttgatgatgggggtgcgccccatcgccaggcacaccgccttgcaccacaccgtcagcggggagacacgcaggcctttgaaacgacggtcggcacgcagccggttgaccagctccatcgtcggggtgacgtcgcaggtaaggaaggccgtcacgagggccttcgtatccaaggaatccttcacggccttcgctgtgaccttgcgcaccccacgcactggcaccttgcgggtgtggccgtcgggctcggtcggggcgccaccgaggagacgtcgagacatcaccgacaggctcgccagctcggcgtcgccaggacaagcaccgccgtccccggctgcagcagcgccatgatgagcggccgctttgacgtcactcctcgtcactgcaccctgcggaccggtgccggtcacctgagacaagtcgacgccgaggtctgctgccaatcgtcgggccggcggcttggcaagaatgtgcgcggtgcggtccatgcgcggtgggtcttgacgaggagccggctcggtcagacgctgctccggtttcgcctcggcgtcgtgccgagattccgaaaccgattgctcaggatgagtgtctgcac

SEQ ID NO: 77 - DNA, 13940 bp, Propionibacterium acnes
  source 1..13940: mol_type = genomic DNA
agcaagcacggcaccaaccgggtgatctttcagttgtgccacggcttgacgatgcttctcgtcgagacggacggcttcggtagcctgcaacgcaccgagcacaacccgctgggacgccttgccccacgcctcgaacacctcgtgtgcagcctccgggtccaccgcgatgttccattcacttgtcggcccggtattgccacgataattgatcgccccacccatgacgtgcagcccccgcaacaaccgcggcaattccggttcttcccgcagcgccagcgcgaggttcgtcaacggcccggtgacgatacccaccaacttccccgggtattggcgcgcgagatcaacccacagttgtgccccgctacgcgaatccgggtgacgcccgcactcccctagcacagcgtgccccaacccgtgcggcccgtgggtctcctcggcggtcatgagaggctcgacgagcggaacgtccgcccctcgggcaaccggcacgcccattccgagcagatcagtcaccccaagcgcgtttcgcagtacgtcgtcctgccccacgttgccggcagtcgtcaccaccccgacggtctcaacgtcgtcacggcaggccacgtaggccagggcgaaggcgtcgtcgatacccggatcgcagtccaacaagacgggcagggagcgcgtagaagtcgacatgtcgccacactaaggcttcgaccgttgtggcgtcaccctccgatgcgtccaccaaacttgtagcgggattcatgaagaagcgccgcggaacagaccgtgctccatccccgcgatgatgaactcaattttgagatcgagattcccgcgctcccccatgtcctgcattccgaatagttcgggtagctctccagcgatcctcacaaacttgtccaatccggtgcgaccttcttcatcacaggtcatgtacggctggaccgacatgtacgtctccaaggccgtgtcccccgcgaagtccagggcgaaggctgccccttccttgcccccggggataccgagtgcggccaacctctcaacgatcgccgtgattcgcggtagagctactccgaaggcttcaggccgggtgacaataacggcggccgcctccggatagcggacacacatctgccactgccgatccacgacatcgcgcagcacgtcctgccaggtgcacaactgcggatccggttcgatgtcggcagctatcgcgctgatcgcggcaagctgcaactcctgacgggaactgaactcccggtacaaggcagtggccttcaccccaaggcgctcggcaaccgctcgaagagtgaaactgccaattccttcagctagggtagcgtcaatgacctgacgtcgtgtgaacgcaggtttacgccccggccgttttctcatcacggccgacccacgagcgaccaccccacagcccgttcccgggcatgccacagatcggcatacaggccgctgctggcaatgaggtcgtcatgggttcccacttgacaaaccctaccagtgcgatcgacgacgactatctgatccgccgaacgaatggtgtcgagcttgtgggcgataacgacgattgtcgacgtctgccgcagctgggtcacagcggcctcgacatgggcctcgttctccgggtccaaagccgaggtggcctcgtcgaaaagcagaatcggggcgcgtttgagcaaggcccgagctaccgacacccgctgacgttcgccacccgaaagccgacgacccccttctccgacgctggcatcccaaccgcccggaagacgatcagcaatctcgtcgacaccggccagggctccggcctgacgcacgtgctcatcggtggcgtccgggcaaccgatgcggatattttccgtcagggtggagtcatagaggtacacatcctgaaacaccatggcaagctgactcatgagctgctcagtagtctgatcgcggacatcgaccccaccaactcgcaccgttccggaatcagcatcccagaacctggcaatgagccgaaacagagtggacttgccagcgcccgagggtccgacgatagccgtcaatccgccggccggaacagtgaacgagacgtcgtggaggaccgggcgagcctggtcgtagccgagaggatctcgtcgacctcggcgaccggttcacgcgcagtctcgacggccagggtcgcagcaccgacattctccaacaccttcgtgtagcgcagcgaaaccccgacgaaagccaccgccacgaccgggttcaacgccccgatccgcccaggttcgcggcgagcacgatgagggtcacggcaatgccctgggccgtcaacccgaagacgaagctcgccaacactcctagccacagatccttgcgggcagcacgtctgctggccacctgggcatcatggagaggttgatagccggtggcacgtccagctgcccgcagtgcaggttgagattcacagaactcgactattcgggccgccaattcctgctccgtggggtacgtcaacgcttcaccgcgaagtttgagggcgcgtgaggcgatcgtgaggaggtacatggtcggaatggcaaggagcagggccaaccccaactgccatgaccacatccagcccaggaccatcatgacgagggtagtggtcatgcccttcaccagcggagcggtgaagtgtcccaagcactcgcctagcgtcatgagtccacgcgtcaacaggcgcgagagacgggcgggaaaactcggccgaaaccaccccagcggcaggctggcgacgtgatcaccgatacgggtactgaggtgactcaggatgtctatcgcgcatagataccccgtgctcgactgaaggtacgacaccacagccccggcagcggccagagcagcgagcacccacacccagccccaccaggcaaggcccaacgagggctgccccgcaacgaaagcggtgaacgtcgggatgacggcaaacaggccgactccctcgatcgctcccagcacaccggcccacaccaaggaactgtgcaaccgccgggtgccctcgttggtcaacaatggttggaacgcccgcaccaggaggatgtccccgacccaagaaagacgtgacgacgtggtgctcatcgggtgactccctccatgattcgtcccgccgacagccgcgcccagtagggctgttcggccagttgctcggcggtgccgcaggctgcgatagagccgttctccatgacgcagatgacatcagccccaatcaccgactcggcgtgatgaccgatgaccaacacggttcggcctcgagccaaagcggccagggcctgctggatctcggcctcgcagtctggatcggtggccgcagtcgcctcgtccaggacgagaatcggggcatcggccaacacggcccgcgcaatggacaggcgctgcttctgcccacctgacaagttggtgtcctcacccaggacggtgtcgaaaccggcgggcagggcatcaatgtcgtcgaggattcgggccgtgcgggcggcattgcgaacttgttcttcggtggcatcggggcgagccagggtaatgacgtcacggatggattgacgctgcaagtatgggtcctgcaagacgaaggagacgagtcggtaaaggtcggtcggggagagctccctgaggtccaccccaccgatgcgcaccgtgccgaaatcaggatcgcggaatcgggccaacatcgtcgcgagggtcgacttgcccgacccagacgggcccacgagggccgtgacagtgcccgggcgcagtgtcagagagacgtggttgagggccggaacctcgccgtcaggggtgtggtaggagacgctgatgtcgtcaaaggtgaccgtcgtgtcctcgggaatcgcggagctggtaccaggctcgtcgatctgctcgatagacaggacctcctgcagacgcaacgctgcaccaccagcttgctggtacatccacgccgtgcttccaagcacctcgacggtgcgcggcagcacgagggcgataagggagcaggtgagaacatcggcgacacccacccaaccggccctggccatgagtagaccgaagccgaggttgatcgccatgagcgcaggcaccgagatcaccgactgagacagggcggacgccttgatgagcgggccgcaccagtcccagtaaaaccgggcgaactcctcgcaggcagtggtgaagcgtcggtgggccttgcctgtctgaccgaagttcttgacgacgtggatgccctcggtcaactcgatggcgttggccgagatgttggcaagtttgtcgttcatctcggcggtcttggcggtcatgccccgcatcgaccaccactgcaacagggcatagatcgggaaagtcgccagacagagcagacccagccgccaatccactacgaaggcgtagacgagcagtaccacggggatgccgatcgccgcggtctgctccaccggggcgtgggcgacaagtgcatgcacctggacggtgtcgtcctggatggccttacgcacctgcccggtggacgacgaactgaaccatgccagcggtgcccgggacaggcgcccgatgatgcgaccctgcaggacactgcgcagtttgaggtcagcgaaatgtgtgatgacaacggctagcacgtagagcagggcctgggtgcagaaggccgccaccaacaggttcgcggtatgtacgagggcctcgtggtcgatatgggcgctcagcaggatggtgccgagcttcaccaaggccagatagggggccaaggcgacgacgcaggaggcgatgacgataatccgcgccgccaggattcgtccccggaccggttgcataagcgatgagagggctctacccccggcgcggtgcttggcctgatagtcgtgggaactttcggcagatgcagtttcctgggctgccacggaggctggaggcgacggttgggacgggccaacgatggaggcaggatcccccgaggtggttctgctcacttcgtcagtcccgcccgccggaagtgtttgcgccccaccttgatgcccagccaaccaccgagaagtccaagcaggaacaccgcgacggcccatccggcgaccagaccgggggtaaacagtgctcgcatcttgttggaataatcggcacccatttgcttggtgatcatggcgtagtacttgtcggcgttcacgaccatcggtatcagtggcgcaaccacccaaagggtgaataccgcatagccgagggacgcccggcgcgggtccaggcgaacgttacgcccggcgttggtggtgaccagatcggcgatgaagccgagcacgagcccggcgggaatcatccagatagtgtgcccgggcatcataccgagtccgacgagcagcccggtgatcgtcaaagcgcccattttcgggacccgtgccattgacagcatcacgatgatcccgcccagcagaataccgaggatccagccaacgaacatgaacgccggcccggcgaaaccaatcatcccgcaggcgtagaaggcgacgaagaaaatcaccgcgaaaatggctacggtcaccagatcacgagtggtcaggcgtgatttcatgatttccctttcaaggtggcgatattgaccagaaagtccccgcaccgggccatgagctccgggtcgtgggtgatgacgatgacaaccttcccggcggtggcaagttcaccgacgagatcggcgatcgacgcgagatgtcggcgatcgacacctgaggtcggttcgtcgaaaatgacgacctccttgtcttgcgcgatggtggccgcgacgacgaggcgttgcgcctgcccacccgacaaggacaaggggtggcggtcatgttcgccagccaggtcgagacgtttcagaagtcccgatacgtcggcggcatctcgatgcggaagatccagtccgagggtgacttcacgttctaccgactcgctgaaaagctgacggcgaacgtcctgcatcaccatcccgcaacatttctgacgcctgccgggggtccagggcactcccatgacgatgcgagcttcggtaggggatttttcgagcccgcacacgattcgggccaaggtcgacttccccgcgccattcgggccggtcagaatcgtcaccgccccgccaggcaggaacagggaatcgatgtcgagaatcgtcgagccgggacggtaagagaaggcgaggtgctcgatggtcagccctgccgggatttttgtgcagccggctgaggcgggatcggagcgcatgaacttgcctcggggcaccggagtaagcggagccggagcctgcggcggcgccggcaggtcgaccgggttgacgtcgagactgcgcaagccccgttctagcaagtccccctctgtcagcgcgaaaaggctgctgccgctcattcgctcaacgatctggccattggaaacacgatgcacgtcgtcaacaagtccgcggaacagatgcagccggtgctcagcgatcacaagggtcttgttggcagctttgagctcggtgacgagagcgcgaaaatcgtcgatcccctcagccgagaggttcaaggtcggctcatcgaaaagaagcaggtcgacatcagccaccagcgcgcaggcgcaggcgacccgctggagttctcctcctgaaagggtgtcgaggtggcggtcgagcaggtgagagataccggttcgggaaaccgcacgggagacagcttcgcggatgtcaaccggatcgaccccatagttctccagcccgaaggccagctctgtgcgcacgctggaggtgaagaactgggtacggggattctggaaaatcatcgcggaggtgcggccgacatcgtgcagttcgacaccggccaggtcagtaccttggaccatgacgtggccgcgcaacgttcccccgaagaattgggggacgagtccattcatcgtccgcaatagggtggatttccctgaccccgacgctcctactagcaaggtgagggtgcctggttggatcgtcatcgtgatgccacgaagctgttctacgaactcccgctcgggggccggaccgtcggagaacggcgaggagtcggggtcgaacgaggggtagccgtagctgacgccgttgaggctgacgatgctcacacaatcacctcgctaacacgccacacaaccaacgcggccaaaatcgtcagcacgagggcgtcgccgacacgaaaacgactcggctgggtgttcgatcgggatttttgtgcaccgagtcccttgatgatggcggctgcggaaagttcgtcggcgatgcgggcagccgaggccaggaagggaatgacgacgtactctcccgtacgtatcgggtgacgcacagccgaccgcgccccagggttgaggccgcgcagggtcatggcctggacgattgctcgcagctcgcgtactgccatcgggaagaaccgaaccaccaccatgacgggcacataaatgacgcgcggagcatgcaattgggtgaggaccgcgccgactcgagtgacgtcgaggactttgatcgccgctactgccgcaccaaagactccggcgaaccgaaacatccagaaggcgatgaagaccaggaacgccgatactgtcgagcgccacagcactgggagtaggaagcagcagaaaatccacaccagcacgaagatcgtccagctgatccaggacttcgaccgggtagtcaagaccaagaacacccacaccactccaagactggtcatcacgagggctgttgatcctgctcccatgagtaggacgttgagaacgatgacgtagagggcgagggtgcgtggatccaccgcgccgaagagctgccgagatcggcgagtgtggaacgccgaagcagcatcgaaacctatcccggcaaccgagcgactatggggaacgcggtgagtggctccgggcagcgccagggtcgcctcatcatgtttcataaggtaaccctatctcataactgattgctgttaacaaataccttctctcccacgttgacccagagttggccatgatggcgccatatgagctccctgccaccacgtgaggcacgatggaggggccgacgaccagttaccgaagaacaggtgtgagcatgactgacgtggagaagtccccgactcgcggtgagaggattctcgccgctgtggtcgccttcaccctctggatggccgtgatattcgcgattgtggcgatcttcgtcggctggcggtggtctctgcggatgttcgtcggggtgctcctcatcggtatccccggagagatcgttatggagctcgtcggtcggggaccgttgctgccgagcggcgcgtcgagaatacggcgttcccgtggttcgcggttactcctctcggcactcatccttatcgtgtgggcgttcatcgttctcgcggcgattgcgctcattcagccctggtacggcgctaccggtgacatggcctgggtgatggtcgtagggatcgcggcgatcctcgtgcaggagggcaccgacacccgcaagaagaagtcctgatcatctctcatgaagggcttgtcggctcctcgcatacaagggggtcgatagtggtggccggaacgtgcgggtttgatctcgccacaatcatggataccgccagctttggtgtccgtccctgccacaaagcatcacaaaagcatcggtttacacgtcagcatcgctgctgcggttgatcgtgaggccacctgagaccattcagggcaggctcacccattcccttccgatttacacctcgtgcgaactcgcaccgcctacaattccagagcaacgacgcctcatccccgtcgccatagtcaggaaaacactgatgatgcccagggtccgcccgtgacgaagaagagctccctcgtcctggcgatggcgtccatcggtgccatcgctgttgggctgaccgggcgtgctcgtcagctcaccctcgccttcaactccgcgagttggctcgtcgccgtcatcgcgctgagctatctcatccgctccgggcacagcgaaaaaacagcatggctggcccaaccaccgagggtgcccgaggcacagccgccaggcggttgacggtctcctcgacgtgcattctcacaccatcgcacggcgaacatccaccgatccgctgcccaagcacggctaccctggaactcagttgagtgagaggagacccgcgtgggcatcggaagcaacatcggcaaggcactgttggcccaagcccccgacatggcacccggcgcagctgtctcactactacgcagcatcctcggattcgctatcgacggcgcctcagggctgccgggagcgcgtcaggctgccggcaagacgctcaccaagcacgagggcgatattgagcaggcgatcagctccttagtcaatcagcacattgcgatggccggggcccaggggttcgtctccaacctcggtggcgtcgtcactctggccgtgactatccccgccaatatctccggcgttgcgatcgtgcaagcccgcatggtggctgccatcgcccacctgcgcgggtacgatctcgacgaccagcgggtccgcaccgccatcctcgccactctcatgggtcagcgcgaggtcgatagcctcgtccacgaggagaagctaccgacgacaccgatgggcatcgctaccgctccagtcggtgacgccgatctcgaaaaggtcgtcgcccggaacctcgtcaatgtccttatggggcaggtcgcaggtaagaagctgcctgtgttcgtctccaagcgcgttcctgtacttggcggcggagtcggtgccaccgctgacggattcaccacgtggagcgtggcccgctacgcccgtaagcaattccccacccgccgtccacgcacctgagacccgcacactcgggatacggccaggacgattcgggggcaggaatagtggcgtccgaccacagtgacaggatctggccgggattcaacgacgcagggatttcaccccgcccagcccccatgcgtacccgacaacacctaggaaggcacaaacgacggcacacaccatggccatggtagacactgtcggcgcactcccctcgacggcggccgtttttcctggatagccgccggggaggaatcgcaggagggtcttcgactgtgcgacgaccacaaccaggtagatcaggggaccgcacaatggcccgactcgccgtgacaccattcccgtgacgaacaatgcgataccggtacacagcacgcaagtcaccgagaaccctatgaatggcggccacggcagctgaaaccgtgcgggaatttgcggtaccaggacggaatcaccatcaggtatcaactcaacgggcaacgatcgcagtacccatcctatgagcaatggaagaccagctgcacagccgcatatccacagccccatccacgcatatccaaccgtgagggaccgaaccgatgtcctctcgacccaatccatggccgatgagacacaccacatgatggtggcacaacccaccagaatgatcagctcgggaccagtcacagggcgatcccacacgtctctcggcgccaccgacagactcgccttccacaggaagaaggccacgagcaaggccacaagcggcgcaatgacaagggcactagcatggcgccccttcaggaaagtcgctacgcctctcatcggtgaagatcactggaggtcaatgaacacgtgcttaccgcatgatgatgctccgtataccaatgacggaatgcggttacatccatgccgtcaaggccatttcgttccgaactcgtcgcatcatcatgctgaaatccagccagccgaagaatggtacgttccacggaatcgacgccattgagggcccccatctgctgagatgtcaactccgaccctccggtctcacgcataaaagcacatgcgtcccggcctgaaaatgattgagccagcccctcacccgtcagatccgacatttgttgtctagagccatgtgaggtcggtcggccgagatcaatcacacgttgccccctgtatgtttggtacccagactcagcaagcaggacgtcacgggaaaccaccgtttgcggcaggacagacaagacgcgttgagcgggtttcgcgtaggacgccgcgagactccgatgtgctggcgtgacgcatacccgcacaccttcgtgcgacgaacactcaaaggctagtggcgcatcacgaaacaacggcaccggcaagacgacgcccacggcagcaatgatgagcggtggggcgatcaaggccacacaaggcatcactcgacgccagcagaacctgtcggcacggaccctggaccaacggctggcggtgaggatacaggacaaggtgacgatgcagaagaagatggcgcgcatgaccacggccgcgaccgtgacggtgtgggtgccacccggttccgacattcctaaagaccatgcaaaggtcaccgagccatgccccgtgttggcaaggagatttccgttgacgacgatcggcatttcgaccaggacgatgcacacaacaggtgccaccagccacacgatggggtgggacaccatcgcggccacgaggtgagcaacggccaccaaagccgcgaatgacagcaggacgacgattaagtcggaggcttcggcgacggtcggagtcgcattgagccacgtcttagcgaccagcggggccgccacgatgaccgtcccgatgaggagggcagccgcctgccgccagaaccagtgccagtgaatgccaagaatggaccgcgccggagcaacccccacaaccatgtccgaaggtgccgtgcgtgccgctaggcccgcccccatgaggccagccacgatgccccacagcatactggactcccggagcgtgacggcgacatcctgcacttgccacaacccccaagcccatcgacctcgcaacgcaatgaagctgcacatggctcctccgaccgtcacgagaaccatgtgccatgacgtgaaggggaatgccatgcggtgaaaaccgcgcagcggacgtataccctgaagcgaagtgagcatcacgctgcgcccccgagaagagtgaggtatccagcctcagcatcgttggtattacggactgggtgccctcggccaacagattccagttcggaatacgagccctcgaagatcagctttccctcggacaggacgacgagttgcgacacgaagccctggagatcctcaagcaggtgagtcgacacaatgaccgtccgatcttcggcgagctcaccgaagagggatcgcaccccaatccttgatgccgggtcgaggcctaccgtcggctcatcaagcagtagtacagctggatcgccgacaatcgcacacgcgattccaagtcgttgacgcattccacccgacagggactggacgcgctcatcggcgcggtcaagaagcccaacacgatcgagggctgcacatgccctcgcacggcattcgctcggttcaacgtctcgcgcccaggccgcatattccaccgcccgccggatacggaagtgcgacgggagggaaaatcgctggggcaggaatccgaccaaaccacggatggtgtcgacgtcatcgctgacatcgacaccattcacccgaaagtggccggactccggttcacggagtgtcgcgaggatactgagaagtgtcgactttccggccccattcggaccgagcagcccccacaaaccagagccaaactcacaggaaatatcaaccaggctacgccgatggcggtaacggtgtgatacgtgcttgagttcaatcattcacttgaccgtaacgtaacccaatttcgctgatgccatacgacgccctttctgaagcagaaacatctccaatggaaaacccgctaccgcatccatactttcacttaaagtgaggcagtgtcaatcttgtggcaaattcggtggcacatatcgcgctcccgcaattcttctcagaatcgggtcagtacagcattgccgacgccgggtcagagaggatctccgcaacgtcgtggaggaatgtcgaaccctgctcaccgtcaataagacgatgatcgaacccgaggctcatcgtcgtcacccacctgggcacaacgcgctcgtcatcaccggtcccgacgacccacggccgccgagcgagagcaccgagcacgaggatcgctgactctgtccggttgaccacgggagtaccggcatcgagcccgaacaccccgacgttcgtgatcgagaaggtaccgtcggcatagtcgggcggttgcagtttgtcttccttggcgatcgcaacgatccgggtgatctccgtcgccaactcaagcatcgccatgtcctgggcgtcgcgcaccaccggcaccataaggccgcgaggcgtggcggcggcaatgccgaggttgatgtggtcacggaagacgatctggtcagcggcgtcatcccatgcggcgttgatgatgggggtgcgccccatcgccaggcacaccgccttgcaccacaccgtcagcggggagacacgcaggcctttgaaacgacggtcggcacgcagccggttgaccagctccatcgtcggggtgacgtcgcaggtaaggaaggccgtcacgagggccttcgtatccaaggaatccttcacggccttcgctgtgaccttgcgcaccccacgcactggcaccttgcgggtgtggccgtcgggctcggtcggggcgccaccgaggagacgtcgagacatcaccgacaggctcgccagctcggcgtcgccaggacaagcaccgccgtccccggctgcagcagcgccatgatgagcggccgctttgacgtcactcctcgtcactgcaccctgcggaccggtgccggtcacctgagacaagtcgacgccgaggtctgctgccaatcgtcgggccggcggcttggcaagaatgtgcgcggtgcggtccatgcgcggtgggtcttgacgaggagccggctcggtcagacgctgctccggtttcgcctcggcgtcgtgccgagattccgaaaccgattgctcaggatgagtgtctgcac

SEQ ID NO: 78 - DNA, 11835 bp, Propionibacterium acnes
  source 1..11835: mol_type = genomic DNA
gtagccgagaggatctcgtcgacctcggcgaccggttcacgcgcagtctcgacggccagggtcgcagcaccgacattctccaacaccttcgtgtagcgcagcgaaaccccgacgaaagccaccgccacgaccgggttcaacgccccgatccgcccaggttcgcggcgagcacgatgagggtcacggcaatgccctgggccgtcaacccgaagacgaagctcgccaacactcctagccacagatccttgcgggcagcacgtctgctggccacctgggcatcatggagaggttgatagccggtggcacgtccagctgcccgcagtgcaggttgagattcacagaactcgactattcgggccgccaattcctgctccgtggggtacgtcaacgcttcaccgcgaagtttgagggcgcgtgaggcgatcgtgaggaggtacatggtcggaatggcaaggagcagggccaaccccaactgccatgaccacatccagcccaggaccatcatgacgagggtagtggtcatgcccttcaccagcggagcggtgaagtgtcccaagcactcgcctagcgtcatgagtccacgcgtcaacaggcgcgagagacgggcgggaaaactcggccgaaaccaccccagcggcaggctggcgacgtgatcaccgatacgggtactgaggtgactcaggatgtctatcgcgcatagataccccgtgctcgactgaaggtacgacaccacagccccggcagcggccagagcagcgagcacccacacccagccccaccaggcaaggcccaacgagggctgccccgcaacgaaagcggtgaacgtcgggatgacggcaaacaggccgactccctcgatcgctcccagcacaccggcccacaccaaggaactgtgcaaccgccgggtgccctcgttggtcaacaatggttggaacgcccgcaccaggaggatgtccccgacccaagaaagacgtgacgacgtggtgctcatcgggtgactccctccatgattcgtcccgccgacagccgcgcccagtagggctgttcggccagttgctcggcggtgccgcaggctgcgatagagccgttctccatgacgcagatgacatcagccccaatcaccgactcggcgtgatgaccgatgaccaacacggttcggcctcgagccaaagcggccagggcctgctggatctcggcctcgcagtctggatcggtggccgcagtcgcctcgtccaggacgagaatcggggcatcggccaacacggcccgcgcaatggacaggcgctgcttctgcccacctgacaagttggtgtcctcacccaggacggtgtcgaaaccggcgggcagggcatcaatgtcgtcgaggattcgggccgtgcgggcggcattgcgaacttgttcttcggtggcatcggggcgagccagggtaatgacgtcacggatggattgacgctgcaagtatgggtcctgcaagacgaaggagacgagtcggtaaaggtcggtcggggagagctccctgaggtccaccccaccgatgcgcaccgtgccgaaatcaggatcgcggaatcgggccaacatcgtcgcgagggtcgacttgcccgacccagacgggcccacgagggccgtgacagtgcccgggcgcagtgtcagagagacgtggttgagggccggaacctcgccgtcaggggtgtggtaggagacgctgatgtcgtcaaaggtgaccgtcgtgtcctcgggaatcgcggagctggtaccaggctcgtcgatctgctcgatagacaggacctcctgcagacgcaacgctgcaccaccagcttgctggtacatccacgccgtgcttccaagcacctcgacggtgcgcggcagcacgagggcgataagggagcaggtgagaacatcggcgacacccacccaaccggccctggccatgagtagaccgaagccgaggttgatcgccatgagcgcaggcaccgagatcaccgactgcgatagggcggacgccttgatgagcgggccgcaccagtcccagtaaaaccgggcgaactcctcgcaggcagtggtgaagcgtcggtgggccttgcctgtctgaccgaagttcttgacgacgtggatgccctcggtcaactcgatggcgttggccgagatgttggcaagtttgtcgttcatctcggcggtcttggcggtcatgccccgcatcgaccaccactgcaacagggcatagatcgggaaagtcgccagacagagcagacccagccgccaatccactacgaaggcgtagacgagcagtaccacggggatgccgatcgccgcggtctgctccaccggggcgtgggcgacaagtgcatgcacctggacggtgtcgtcctggatggccttacgcacctgcccggtggacgacgaactgaaccatgccagcggtgcccgggacaggcgcccgatgatgcgaccctgcaggacactgcgcagtttgaggtcagcgaaatgtgtgatgacaacggctagcacgtagagcagggcctgggtgcagaaggccgccaccaacaggttcgcggtatgtacgagggcctcgtggtcgatatgggcgctcagcaggatggtgccgagcttcaccaaggccagatagggggccaaggcgacgacgcaggaggcgatgacgataatccgcgccgccaggattcgtccccggaccggttgcataagcgatgagagggctctacccccggcgcggtgcttggcctgatagtcgtgggaactttcggcagatgcagtttcctgggctgccacggaggctggaggcgacggttgggacgggccaacgatggaggcaggatcccccgaggtggttctgctcacttcgtcagtcccgcccgccggaagtgtttgcgccccaccttgatgcccagccaaccaccgagaagtccaagcaggaacaccgcgacggcccatccggcgaccagaccgggggtaaacagtgctcgcatcttgttggaataatcggcacccatttgcttggtgatcatggcgtagtacttgtcggcgttcacgaccatcggtatcagtggcgcaaccacccaaagggtgaataccgcatagccgagggacgcccggcgcgggtccaggcgaacgttacgcccggcgttggtggtgaccagatcggcgatgaagccgagcacgagcccggcgggaatcatccagatagtgtgcccgggcatcataccgagtccgacgagcagcccggtgatcgtcaaagcgcccattttcgggacccgtgccattgacagcatcacgatgatcccgcccagcagaataccgaggatccagccaacgaacatgaacgccggcccggcgaaaccaatcatcccgcaggcgtagaaggcgacgaagaaaatcaccgcgaaaatggctacggtcaccagatcacgagtggtcaggcgtgatttcatgatttccctttcaaggtggcgatattgaccagaaagtccccacaccgggccatgagctccgggtcgtgggtgatgacgatgacaaccttcccggcggtggcaagttcaccgacgagatcggcgatcgacgcgagatgtcggcgatcgacacctgaggtcggttcgtcgaaaatgacgacctccttgtcttgcgcgatggtggccgcgacgacgaggcgttgcgcctgcccacccgacaaggacaaggggtggcggtcatgttcgccagccaggtcgagacgtttcagaagtcccgatacgtcggcggcatctcgatgcggaagatccagtccgagggtgacttcacgttctaccgactcgctgaaaagctgacggcgaacgtcctgcatcaccatcccgcaacatttctgacgcctgccgggggtccagggcactcccatgacgatgcgagcttcggtaggggatttttcgagcccgcacacgattcgggccaaggtcgacttccccgcgccattcgggccggtcagaatcgtcaccgccccgccaggcaggaacagggaatcgatgtcgagaatcgtcgagccgggacggtaagagaaggcgaggtgctcgatggtcagccctgcggggatttttgtgcagccggctgaggcgggatcggagcgcatgaacttgcctcggggcaccggagtaagcggagccggagcctgcggcggcgccggcaggtcgaccgggttgacgtcgagactgcgcaagccccgttctagcaagtccccctctgtcagcgcgaaaaggctgctgccgctcattcgctcaacgatctggccattggaaacacgatgcacgtcgtcaacaagtccgcggaacagatgcagccggtgctcagcgatcacaagggtcttgttggcagctttgagctcggtgacgagagcgcgaaaatcgtcgatcccctcagccgagaggttcaaggtcggctcatcgaaaagaagcaggtcgacatcagccaccagcgcgcaggcgcaggcgacccgctggagttctcctcctgaaagggtgtcgaggtggcggtcgagcaggtgagagataccggttcgggaaaccgcacgggagacagcttcgcggatgtcaaccggatcgaccccatagttctccagcccgaaggccagctctgtgcgcacgctggaggtgaagaactgggtacggggattctggaaaatcatcgcggaggtgcggccgacatcgtgcagttcgacaccggccaggtcagtaccttggaccatgacgtggccgcgcaacgttcccccgaagaattgggggacgagtccattcatcgtccgcaatagggtggatttccctgaccccgacgctcctactagcaaggtgagggtgcctggttggatcgtcatcgtgatgccacgaagctgttctacgaactcccgctcgggggccggaccgtcggagaacggcgaggagtcggggtcgaacgaggggtagccgtagctgacgccgttgaggctgacgatgctcacacaatcacctcgctaacacgccacacaaccaacgcggccaaaatcgtcagcacgagggcgtcgccgacacgaaaacgactcggctgggtgttcgatcgggatttttgtgcaccgagtcccttgatgatggcggctgcggaaagttcgtcggcgatgcgggcagccgaggccaggaagggaatgacgacgtactctcccgtacgtatcgggtgacgcacagccgaccgcgccccagggttgaggccgcgcagggtcatggcctggacgattgctcgcagctcgcgtactgccatcgggaagaaccgaaccaccaccatgacgggcacataaatgacgcgcggagcatgcaattgggtgaggaccgcgccgactcgagtgacgtcgaggactttgatcgccgctactgccgcaccaaagactccggcgaaccgaaacatccagaaggcgatgaagaccaggaacgccgatactgtcgagcgccacagcactgggagtaggaagcagcagaaaatccacaccagcacgaagatcgtccagctgatccaggacttcgaccgggtagtcaagaccaagaacacccacaccactccaagactggtcatcacgagggctgttgatcctgctcccatgagtaggacgttgagaacgatgacgtagagggcgagggtgcgtggatccaccgcgccgaagagctgccgagatcggcgagtgtggaacgccgaagcagcatcgaaacctatcccggcaaccgagcgactatggggaacgcggtgagtggctccgggcagcgccagggtcgcctcatcatgtttcataaggtaaccctatctcataactgattgctgttaacaaataccttctctcccacgttgacccagagttggccatgatggcgccatatgagctccctgccaccacgtgaggcacgatggaggggccgacgaccagttaccgaagaacaggtgtgagcatgactgacgtggagaagtccccgactcgcggtgagaggattctcgccgctgtggtcgccttcaccctctggatggccgtgatattcgcgattgtggcgatcttcgtcggctggcggtggtctctgcggatgttcgtcggggtgctcctcatcggtatccccggagagatcgttatggagctcgtcggtcggggaccgttgctgccgagcggcgcgtcgagaatacggcgttcccgtggttcgcggttactcctctcggcactcatccttatcgtgtgggcgttcatcgttctcgcggcgattgcgctcattcagccctggtacggcgctaccggtgacatggcctgggtgatggtcgtagggatcgcggcgatcctcgtgcaggagggcaccgacacccgcaagaagaagtcctgatcatctctcatgaagggcttgtcggctcctcgcatacaagggggtcgatagtggtggccggaacgtgcgggtttgatctcgccacaatcatggataccgccagctttggtgtccgtccctgccacaaagcatcacaaaagcatcggtttacacgtcagcatcgctgctgcggttgatcgtgaggccacctgagaccattcagggcaggctcaccgattcccttccgatttacacctcgtgcgaactcgcaccgcctacaattccagagcaacgacgcctcatccccgtcgccatagtcaggaaaacactgatgatgcccagggtccgcccgtgacgaagaagagctccctcgtcctggcgatggcgtccatcggtgccatcgctgttgggctgaccgggcgtgctcgtcagctcaccctcgccttcaactccgcgagttggctcgtcgccgtcatcgcgctgagctatctcatccgctccgggcacagcgaaaaaacagcatggctggcccaaccaccgagggtgcccgaggcacagccgccaggcggttgacggtctcctcgacgtgcattctcacaccatcgcacggcgaacatccaccgatccgctgcccaagcacggctaccctggaactcagttgagtgagaggagacccgcgtgggcatcggaagcaacatcggcaaggcactgttggcccaagcccccgacatggcacccggcgcagctgtctcactactacgcagcatcctcggattcgctatcgacggcgcctcagggctgccgggagcgcgtcaggctgccggcaagacgctcaccaagcacgagggcgatattgagcaggcgatcagctccttagtcaatcagcacattgcgatggccggggcccaggggttcgtctccaacctcggtggcgtcgtcactctggccgtgactatccccgccaatatctccggcgttgcgatcgtgcaagcccgcatggtggctgccatcgcccacctgcgcgggtacgatctcgacgaccagcgggtccgcaccgccatcctcgccactctcatgggtcagcgcgaggtcgatagcctcgtccacgaggagaagctaccgacgacaccgatgggcatcgctaccgctccagtcggtgacgccgatctcgaaaaggtcgtcgcccggaacctcgtcaatgtccttatggggcaggtcgcaggtaagaagctgcctgtgttcgtctccaagcgcgttcctgtacttggcggcggagtcggtgccaccgctgacggattcaccacgtggagcgtggcccgctacgcccgtaagcaattccccacccgccgtccacgcacctgagacccgcacactcgggatacggccaggacgattcgggggcaggaatagtggcgtccgaccacagtgacaggatctggccgggattcaacgacgcagggatttcaccccgcccagcccccatgcgtacccgacaacacctaggaaggcacaaacgacggcacacaccatggccatggtagacactgtcggcgcactcccctcgacggcggccgtttttcctggatagccgccggggaggaatcgcaggagggtcttcgactgtgcgacgaccacaaccaggtagatcaggggaccgcacaatggcccgactcgccgtgacaccattcccgtgacgaacaatgcgataccggtacacagcacgcaagtcaccgagaaccctatgaatggcggccacggcagctcaaaccgtgcgggaatttgcggtaccaggacggaatcaccatcaggtatcaactcaacgggcaacgatcgcagtacccatcctatgagcaatggaagaccagctgcacagccgcatatccacagccccatccacgcatatccaaccgtgagggaccgaaccgatgtcctctcgacccaatccatggccgatgagacacaccacatgatggtggcacaacccaccagaatgatcagctcgggaccagtcacagggcgatcccacacgtctctcggcgccaccgacagactcgccttccacaggaagaaggccacgagcaaggccacaagcggcgcaatgacaagggcactagcatggcgccccttcaggaaagtcgctacgcctctcatcggtgaagatcactggaggtcaatgaacacgtgcttaccgcatgatgatgctccgtataccaatgacggaatgcggttacatccatgccgtcaaggccatttcgttccgaactcgtcgcatcatcatgctgaaatccagccagccgaagaatggtacgttccacggaatcgacgccattgagggcccccatctgctgagatgtcaactccgaccctccggtctcacgcataaaagcacatgcgtcccggcctgaaaatgattgagccagcccctcacccgtcagatccgacatttgttgtctagagccatgtgaggtcggtcggccgagatcaatcacacgttgccccctgtatgtttggtacccagactcagcaagcaggacgtcacgggaaaccaccgtttgcggcaggacagacaagacgcgttgagcgggtttcgcgtaggacgccgcgagactccgatgtgctggcgtgacgcatacccgcacaccttcgtgcgacgaacactcaaaggctagtggcgcatcacgaaacaacggcaccggcaagacgacgcccacggcagcaatgatgagcggtggggcgatcaaggccacacaaggcatcactcgacgccagcagaacctgtcggcacggaccctggaccaacggctggcggtgaggatacaggacaaggtgacgatgcagaagaagatggcgcgcatgaccacggccgcgaccgtgacggtgtgggtgccacccggttccgacattcctaaagaccatgcaaaggtcaccgagccatgccccgtgttggcaaggagatttccgttgacgacgatcggcatttcgaccaggacgatgcacacaacaggtgccaccagccacacgatggggtgggacaccatcgcggccacgaggtgagcaacggccaccaaagccgcgaatgacagcaggacgacgattaagtcggaggcttcggcgacggtcggagtcgcattgagccacgtcttagcgaccagcggggccgccacgatgaccgtcccgatgaggagggcagccgcctgccgccagaaccagtgccagtgaatgccaagaatggaccgcgccggagcaacccccacaaccatgtccgaaggtgccgtgcgtgccgctaggcccgcccccatgaggccagccacgatgccccacagcatactggactcccggagcgtgacggcgacatcctgcacttgccacaacccccaagcccatcgacctcgcaacgcaatgaagctgcacatggctcctccgaccgtcacgagaaccatgtgccatgacgtgaaggggaatgccatgcggtgaaaaccgcgcagcggacgtataccctgaagcgaagtgagcatcacgctgcgcccccgagaagagtgaggtatccagcctcagcatcgttggtattacggactgggtgccctcggccaacagattccagttcggaatacgagccctcgaagatcagctttccctcggacaggacgacgagttgcgacacgaagccctggagatcctcaagcaggtgagtcgacacaatgaccgtccgatcttcggcgagctcaccgaagagggatcgcaccccaatccttgatgccgggtcgaggcctaccgtcggctcatcaagcagtagtacagctggatcgccgacaatcgcacacgcgattccaagtcgttgacgcattccacccgacagggactggacgcgctcatcggcgcggtcaagaagcccaacacgatcgagggctgcacatgccctcgcacggcattcgctcggttcaacgtctcgcgcccaggccgcatattccaccgcccgccggatacggaagtgcgacgggagggaaaatcgctggggcaggaatccgaccaaaccacggatggtgtcgacgtcatcgctgacatcgacaccattcacccgaaagtggccggactccggttcacggagtgtcgcgaggatactgagaagtgtcgactttccggccccattcggaccgagcagcccccacaaaccagagccaaactcacaggaaatatcaaccaggctacgccgatggcggtaacggtgtgatacgtgcttgagttcaatcattcacttgaccgtaacgtaacccaatttcgctgatgccatacgacgccctttctgaagcagaaacatctccaatggaaaacccgctaccgcatccatactttcacttaaagtgaggcagtgtcaatcttgtggcaaattcggtggcacatatcgcgctcccgcaattcttctcagaatcgggtcagtacagcattgccgacgccgggtcagagaggatctccgcaacgtcgtggaggaatgtcgaaccctgctcaccgtcaataagacgatgatcgaacccgaggctcatcgtcgtcacccacctgggcacaacgcgctcgtcatcaccggtcccgacgacccacggccgccgagcgagagcaccgagcacgaggatcgctgactctgtccggttgaccacgggagtaccggcatcgagcccgaacaccccgacgttcgtgatcgagaaggtaccgtcggcatagtcgggcggttgcagtttgtcttccttggcgatcgcaacgatccgggtgatctccgtcgccaactcaagcatcgccatgtcctgggcgtcgcgcaccaccggcaccataaggccgcgaggcgtggcggcggcaatgccgaggttgatgtggtcacggaagacgatctggtcagcggcgtcatcccatgcggcgttgatgatgggggtgcgccccatcgccaggcacaccgccttgcaccacaccgtcagcggggagacacgcaggcctttgaaacgacggtcggcacgcagccggttgaccagctccatcgtcggggtgacgtcgcaggtaaggaaggccgtcacgagggccttcgtatccaaggaatccttcacggccttcgctgtgaccttgcgcaccccacgcactggcaccttgcgggtgtggccgtcgggctcggtcggggcgccaccgaggagacgtcgagacatcaccgacaggctcgccagctcggcgtcgccaggacaagcaccgccgtccccggctgcagcagcgccatgatgagcggccgctttgacgtcactcctcgtcactgcaccctgcggaccggtgccggtcacctgagacaagtcgacgccgaggtctgctgccaatcgtcgggccggcggcttggcaagaatgtgcgcggtgcggtccatgcgcggtgggtcttgacgaggagccggctcggtcagacgctgctccggtttcgcctcggcgtcgtgccgagattccgaaaccgattgctcaggatgagtgtctgcac

SEQ ID NO: 79 - DNA, 2113 bp, Propionibacterium acnes
  source 1..2113: mol_type = genomic DNA
agcaagcacggcaccaaccgggtgatctttcagttgtgccacggcttgacgatgcttctcgtcgagacggacggcttcggtagcctgcaacgcaccgagcacaacccgctgggacgccttgccccacgcctcgaacacctcgtgtgcagcctccgggtccaccgcgatgttccattcacttgtcggcccggtattgccacgataattgatcgccccacccatgacgtgcagcccccgcaacaaccgcggcaattccggttcttcccgcagcgccagcgcgaggttcgtcaacggcccggtgacgatacccaccaacttccccgggtattggcgcgcgagatcaacccacagttgtgccccgctacgcgaatccgggtgacgcccgcactcccctagcacagcgtgccccaacccgtgcggcccgtgggtctcctcggcggtcatgagaggctcgacgagcggaacgtccgcccctcgggcaaccggcacgcccattccgagcagatcagtcaccccaagcgcgtttcgcagtacgtcgtcctgccccacgttgccggcagtcgtcaccaccccgacggtctcaacgtcgtcacggcaggccacgtaggccagggcgaaggcgtcgtcgatacccggatcgcagtccaacaagacgggcagggagcgcgtagaagtcgacatgtcgccacactaaggcttcgaccgttgtggcgtcaccctccgatgcgtccaccaaacttgtagcgggattcatgaagaagcgccgcggaacagaccgtgctccatccccgcgatgatgaactcaattttgagatcgagattcccgcgctcccccatgtcctgcattccgaatagttcgggtagctctccagcgatcctcacaaacttgtccaatccggtgcgaccttcttcatcacaggtcatgtacggctggaccgacatgtacgtctccaaggccgtgtcccccgcgaagtccagggcgaaggctgccccttccttgcccccggggataccgagtgcggccaacctctcaacgatcgccgtgattcgcggtagagctactccgaaggcttcaggccgggtgacaataacggcggccgcctccggatagcggacacacatctgccactgccgatccacgacatcgcgcagcacgtcctgccaggtgcacaactgcggatccggttcgatgtcggcagctatcgcgctgatcgcggcaagctgcaactcctgacgggaactgaactcccggtacaaggcagtggccttcaccccaaggcgctcggcaaccgctcgaagagtgaaactgccaattccttcagctagggtagcgtcaatgacctgacgtcgtgtgaacgcaggtttacgccccggccgttttctcatcacggccgacccacgagcgaccaccccacagcccgttcccgggcatgccacagatcggcatacaggccgctgctggcaatgaggtcgtcatgggttcccacttgacaaaccctaccagtgcgatcgacgacgactatctgatccgccgaacgaatggtgtcgagcttgtgggcgataacgacgattgtcgacgtctgccgcagctgggtcacagcggcctcgacatgggcctcgttctccgggtccaaagccgaggtggcctcgtcgaaaagcagaatcggggcgcgtttgagcaaggcccgagctaccgacacccgctgacgttcgccacccgaaagccgacgacccccttctccgacgctggcatcccaaccgcccggaagacgatcagcaatctcgtcgacaccggccagggctccggcctgacgcacgtgctcatcggtggcgtccgggcaaccgatgcggatattttccgtcagggtggagtcatagaggtacacatcctgaaacaccatggcaagctgactcatgagctgctcagtagtctgatcgcggacatcgaccccaccaactcgcaccgttccggaatcagcatcccagaacctggcaatgagccgaaacagagtggacttgccagcgcccgagggtccgacgatagccgtcaatccgccggccggaacagtgaacgagacgtcgtggaggaccgggcgagcctggtcgtagccga

SEQ ID NO: 80 - DNA, 11827 bp, Propionibacterium acnes
  source 1..11827: mol_type = genomic DNA
aggatctcgtcgacctcggcaaccggttcacgcgcggtctcgatggccagggtcgcggcacagacatcctccaacaccttcgtgtagcgcagcgaaaccccgacgaaggccaccgccacgaccgggctcaaccgtcctgatccgcccaggttcgcagcgagcacgatgagggtcacggcaatgccctgggccgccagcccggagacgaaattcgccaacactcctagccacagatccttgcgggcagcacgtccgctggccacctgggcatcatggagaggttgatagccgctggcgcgtccggctgcccgcagtgcaggctgggattcgcagaactcgactattcgggccgccaattcctgctcagtggggtacgtcaacgcttcaccgcgaagtttgagggcgcgtgaggcgatcgtgaggaggtagatggtcggaatggcaaggagcagggccaaccccaactgccatgaccacatccaggccaggaccatcatgacgagggtagtggtcatgcccttcaccagcggagcggtgaagtgtcccaagcactcgcccagcgtcatgagtccacgcgtcaacaggcgcgagagacgggcgggaaaactcggccggaaccaccccagcggcagactggcgacgtgatcaccgatacggatgctgaggtgactcaggatatctatcgcacatagataccccgtgctcgactgaaggtacgacaccacagccccggcagcaaccaggacagcgagcacccacacccaaccccaccaggcaagacccaacgagggctgccccgcaacgaaagcggtgaacgtcgggatgacggcaaacaggccgactccctcgatcgctcctaacacaccggcccacaccaaggagctgtggaaccgccgggtgccctcgctggtcagcaatggttggaacgcccgcaccaggaggatgtccccgacccaggaaagacgtgacgacgtggtgctcatcgggtgactccctccatgattcgtcccgccgacagccgcacccagtagggctgttcggccagttgctcgacggtgccgcaggctgcgatagagccgttctccatgacgcagatgacatcagccccaatcaccgactcggcgtgatgaccgatgaccaacacggttcggcctcgagccaaagcggccagggcctgctggatctcggcctcgcagtctggatcggtggctgcagtcgcctcgtccaggacgaggatcggggcatcggccaacacggcccgcgcaatggacaggcgctgcttctgtccacctgacaagttggtgtcctcacccaggacggtgtcgaaaccggcgggcagggcatcaatgtcgtcgaggattcgagccgtgcgggcagcgtcacgaacctgttgttcggtggcatcgggacgagccaaggtgatgacgtcacggatggattgacgctgcaggtatgggtcctgcaagacgaaggagacgagtcggtaaaggtcggtcgaggggagctccctgaggtctaccccaccgatgcgcaccgtgccgaaatcaggatcacggaatcgggccaacatcgtcgcgagggtcgacttacctgacccagacgggcccacgagggccgtgacggtgcccgggcgcagtgtcaaggagacgtggttgagggccggaacctcgccgtcaggggtgtggtaggagacgctgatgtcgtcaaaggtgaccgtcgtgtcctcgggaatcgcggagctggtaccaggctcgtcgatctgctcgatagacaggacctcttgcagacgcaacgctgcaccaccagcttgctggtacatccacgccgtgcttccaagcacctcgacggtgtgcggcagcacgagggcgatgagggagcaggtgagaacatcggcaacacccacccagccggccctagccatgagtagaccgaagccgaagttgatcgccatgagcgcaggcaccgagatcaccgactgcgatagggcggacgccttaatgagcgggccgcaccagtcccagtaaaaccgggcgaactcctcgcaggtagtggtgaagcgtcggtgggccttgcctgtctgaccgaagttcttgacgacgtggacgccctcggtcaattcgatggcgttggccgagatatcggcaagtttgtcgtccatctcggcggtcttggcggtcatgccccgcatcgaccaccactgcaacagggcatagatcgggaaagtcgctagacagagcagacccaaccgccaatccactatgaaggcgtagacgagcagcaccacggggatgccgatcgccgcagtctgatccaccggggcgtgggcgacaagtgcatgcacctggacggtatcgtcctggatggccttacgcacctgcccggtggatgacgaactgaaccatgccagcggtgcccgggacaggcgcccgatgatgcgaccctgcaagacactgcgcagtttgaggtcagcgaaatgtgtgatgacaagggccagcacgtagagcagggcctgggtgcagaaggccgccaccaacaggttcgcggtatgtacgagggcctcgtggtcgatatgggcgctcagcaggatggtgccgagcttcaccaaggctagataggggggccaaggcgacgacgcaggaggcgatcgataatccgcgccaccaggattcgtccccggatgggttgcataagcgatgagagggctctacccccggcgcggtgcttggcctgatagtcgtgggagctttcggcagatgcagtttcctgggctgccacggaggctggcggcgacggctgggacgggccaacgatggaggcaggatcccccgaggtggttctgctcacttcgtcagtcccgcccgctggaaatgtttgcgccccaccttgatgcccagccaaccaccgagaagtccaagcaggaacaccacgacggcccatccggcgaccagaccgggagtaaacagtgctcgcatcttgttggaataatcggcacccatttgcctggtgatcatggtgtagtactcgtcggcgttcacgaccatcggtatcagtggcacgaccacccagagggtgaatatcgcgtatccgagagacgcccggcgcgggtccaggcggacattgcgcccggcgttggtggtgaccagatcggcgacgaagccgagcacgagcccggcggggatcatccagatagcatgcccgggcgtcataccgagcccgacgagcagcccggtgatcgtcaaggcgcccattttcgggacccgtgccattgacagcatcacgatgatcccgcccagcagaataccgaggatccagccaacgaacataaacgccggcccggcgaaaccaatcatcccgcaggcgtagaaggcgacgaagaaaatcaccgcgaaaatggctacggtcaccagatcacgagtggtcaggcgtgatttcatgatttccctttcaaggtggcgatattgaccagaaagtccccacaccgggccatgagttccgggtcgtgggtaatgacgatgacaaccttcccggcggtggcaagttcaccgacgagatcggcgatcgacgcgagatgccggcgatcgacacccgaggttggttcgtcgaaaacgacgacctccttgtcttgcgcgatggtggccgcgaccacgaggcgttgggcctgcccacccgacaaagacaaggggtggcgatcacgttcgccggccaggtcaaggcgttccagaagtcccggtacgtcggcggcatctcgatgcggaagatccagcccgagggtgacttcacgttctaccgactcactgaaaagctgacggcgaacgtcctgcatcaccatcccgcaacatttctgacgcctgccgggggtccagggcactcccatgccgatgcgagcttcgggaggggatttttcgagcccgcacacgattcgggccaaagtcgacttccccgcgccattcgagccggtcagaatcgtcaccgccccgccaggcaggaacagagaatcgatgtcgagaatcgtcgagccggtacggtaagagaaggtgaggtgctcgatggtcagccctgccgggattttcgtgcagctgactgaggcgggatcggagcgcatgaacttgcctcggggcaccggagtaagcggagctggagcctgcggtggcgccggcaggtcgaccgagttgacgtcgagactgcgcaggccccgttctagcaagtccccctctgtcagcgcgaaaaggctgctgccgctcattcgctcaacgatctggccattggaaacacgatgcacgtcgtcaacgagtccgcggaacagatgcagccggtgctcagcgatcacgagggtcttgttggcagctttgagctcggtgacgagagcgcgaaaatcttcgatcccctcagccgagaggttcgaggttggttcatcgaaaagaagcaggtcgacatcagccaccagcgcgcaggcgcaggcgacccgctgaagttctcctcctgaaagagtgtcgaggtggcggtcgagcaggtgagagataccggttcgggaaaccgcacgggagacagcttcgcggatatcaaccggatcgaccccatagttctccagcccgaaggccagctcggtgcgcacgctggaggtgaagaactgagtgcggggattctggaaaatcatcgcggaggtgcggccgacattgtgcagttcgacactggccaggtcagtaccttggaccatgacgtggccgcgcaactttcccccgaagaattgggggacgagtccattcatcgtccgcaatagggtggatttccctgaccccgacgctcccaccagcagggtgagggtgcctggttggatcgtcatcgtgatgtcacgaagctgttctacgaactcccgctcgggggccgggccgtcggagaacggcgaggagtcggggtcgaacgaggggtagccgtagctgacgccgttgaggctgacgatgctcacacgatcacctcgctggcacgccacacaaccaacgcgaccaaaatcgtcagcacgagggcgtcgccgacgcgaaaacgactcgactgggtgttcgatcgggatttttgtgcaccgagtcctttgatgatggcggctgcggaaagctcgtcgacgatgcgggcagccgaggccaggaagggaatgacgacgtactcacccgtacgtatcgggtgacgcacagccgaccgcgccccagggttgaggccgcgcagggtcatggcctggacgattgctcgcagctcgcgtactgccatcgggaagaaccgaaccaccaccatgacgggcacataaatgacgcgcggagcatgcaattgggtgaggaccgcgccgacccgagtgacgtcgaggactttgatcgccgctactgccgcaccaaagactccggcgaaccgaaacatccagaaggcgatgaagaccaggaacgccgatactgtcgagcgccacagcactgggagtaggaagcagcagaaaatccacaccagcacgaagatcgtccagcttatccaggacttcgaccgggtagtcaagaccaagaacacccacatcactccaagactggtcatcacgaggactgttgatcctgctcccataagtaggacgttgagaacgatgacgtagagggcgagggtgcgtggatccaccgtgccgaagagctgccgagatcagcgagtgtggaccgccgaagcagtatcgaaacctatcccagcaaccgagcgactatgaggaacgcggtgagtggctccgggcagcgccagggtcgcctcatcatgtttcataaggtaaccctatctcataactgattactgttaacaaatacttcctctcccgctttgacccggagttggccatgacggcgccatatgagctccctgccaccacgtgaggcacgatggaagggccgacgaccaattaccgaagaacaggtgtgagcatgactgacgtggagaagtcctcgactcgcggtgagaggattctcgccgctgtggtcgccttcaccctctggatggccgtgatattcgcgattgtggcgatcttcgtcggctggcggtggtcgctgcggatgttcgtcggggtgctcctcatcggtatccccggagagatcgttatggagctcgtcggccggggaccgttgctgccgagcggcgcgtcgagaatacggcgttcccgtggttcgcggttactcctctcggcactcatcctcatcgcgtgggcgttcatcgttctcgcggcgattgcgctcatacagccctggtacggcgctaccggtgacatggcctgggtgatggtcgtagggatcgcggcgatcctcgtgcaggagggcatcgacacccgcaagaagaagtcctagtcttcgatcatctctcatgaaggacttgtcggctcctcgcatacaagggggtcgatagtggtggccggaacgtgcgggttcgatctcgccacaatcatggataccgccagccttggtgtccgtccctgccacaaagcatcacaaaagcattggtgtacacatcagcatcgctgctgcggttgatcgtgaggccacctgagaccattcagggcaggctcacccattcccttccgatttacacctcgtgcgacctcgcaccgcctacaatttcagagcaacgacgcctcatccccgccgccatagtcaggaaaacactgatgatgcccagggtccgcccgtgacgaagaagagctccctcgtcctggcgatggcgtccatcggtgccatcgctgttgggctgaccgggcgtgctcgtcagctcaccctcgccttcaactccgcgagttgggtcgtcgccgtcatcgcgctgagctatctcatccgctccgggcacagccagaaagcagcatggctggcccaaccaccgagggtgcccgaggcacagccgccaggcggttgacggtctcctcgacgtgcattctcacaccatcgcacggcgaacatccaccgatccgctgcccaagcacggctaccctggaactcagttgagtgagaggagacccgcgtgggcatcggaagcaacatcggcaaggcactgttggcccaagcccccgacatggcacccggcgcagctgtctcactactacgcagcatcctcggattcgctatcgacggcgcctcaggactgccgggagcacgtcaggctgccggcaagacgctcaccaagcacgagggcgatgttgagcaggcgatcagctccttagtcaatcagcacattgcgatggccggggcccaggggttcgtctccaacctcggtggcgtcatcactctggccgtgactatccccgccaatatctccggcgttgcgatcgtgcaagcccgcatggtggctgccatcgcccacctgcgcgggtacgatctcgacgaccagcgggtccgcaccgcgatcctcgccactctcatgggtcagcgcgaggtcgatagcctcatccacgaggagaagctaccgacgacaccgatgggcatcgctaccgctccggtcggtgacgccgatctcgaaaaggtcgtcgcccggaacctcgtcaatgtcctcatggggcaggtcgcgggcaagaagctgcctgtgttcgtctccaagcgcgttcctgtacttggcggcggagtcggtgccaccgctgacggattcaccacgtggagcgtggcccgctacgcccgtaagcaattccccacccgccgcccgcgcacctgagacccgcacgctcgggatacggccaggataattcggggcaggaatagtggcgtccgaccacagtgacgggatgtggccgggattcaacgacgcaaggatttcaccccacccagcccccatgcgtacccgacaacccctaggaaggcacaaacgacggcacacaccatggccgtggtagacactgtcggcgcactcccctcgacggcggccgtttttcctggatagccgccggggaggaatcgcaggagggtgttcgactgcgcgacgaccacaaccaggtagatcaggggaccgcacaatggcccgactcgccgcgacaccattcccgtgacgaacaatgcgataccggtacacagcacgcaagtcaccgagaaccctatgaatggcggccacggcagctgaaaccgtgcgggaatttgcggtaccaggacggaatcaccatcaggtatcaactcaacgggcaacgatcgcagtacccatcctatgagcaatggaagaccagctgcacagccgcatatccacagccccatccacgcatatccaaccgtgagggaccgaaccgatgtcctctcgacccaatccatggccgatgagacacaccacatgatggtggcacaacccaccagaatgatcagctcgggaccagtcacagggcgatcccacacgtctcccggcgccaccgacagactcgccttccacaggaagaaggccacgagcaaggccacaagcggcgcaatgacaagggcaatagcatggcgccccttcaggaaagtcgctacgcctctcatcggtgaagatcactggaggtcaatgaacacgtgcttaccgcatgatgatgcgccgtataccaatgacggaatgcggttacatccatgccgtcaaggccatttcgttccaaactcgtcgcatcatcatgctgaaatccagccagccgaagaatggtacgttccacggaatcgacgccattgagggccccatctgctgagatgtcaactccgaccctccggtctcacgcataaaagcacatgcgtcccggcctgaaaatgattgagccagcccctcacccgtcagatccgacatttgttgtctagagccatatgaggtcggtcggccgagatcaatcacacgttgcccctgtatgcttggtacccagactcagcaagcaggacgtcacgggaaaccaccgtttgcggcaggacagacaagacgcgttgagcgggtttcgcgtaggacgccgcgagactccgatgtgctggcgtgacgcatacccgcacgccttcgtgcgacgaacactcaaaggctagtggcgcatcacgaaacaacggcaccggcaagacgacgcccacggcagcaatgatgagcggtggggcgatcaaggccacacaaggcatcactcgacgccagcagaacctgtcggcacggaccctggaccaacgactggcggtgaggatacaggacaaggtgacgatgcagaagaagatggcgcgcatgaccacggccgcgaccgtgacggtgtgggtgccacccggttccgacattcccaaagaccatgcaaaggccaccgagccatgccccgtgttggcaaggagatttccgttgacgacgatcggcatttcgaccaggacgatacacacaacaggtaccaccagccacacgatggggtgggacaccatcgcggccacgaggtgagcaacggccaccaaagccgcgaatgacagcaggacgacgattaagtcggaggcttcggcgacggtcggagtcgcattgagccacgtcttagcgaccagcggggccgccacgatgaccgtcccgatgaggagggcagtcgtctgccgccagaaccagtgccagtggatgccaagaatggaccgcgccggagcaacccccacaaccatgtccgaaggtgccgtgcgtgccgctaggcccacccccatgaggccagccacgataccccacagcatactggactcccggagcgtgacggcgacatcctgcacttgccacaacccccaagcccatcgacctcgcaacgcaatgaagctgcacatggctcctccgaccgtcacgagaaccatgtgccatgacgtgaaggggaatgccatgcggtgaaaaccgcgcagcggacgtataccctgaagcgaggtgagcatcacgctgcgccccccgagaagagtgaggtatccagcctcagcatcgttggtattacggactgggtgccctcggccaacagattccagttcggaatacgagccctcgaagatcagctttccctcggacaggacgacgagttgcgacacgaagccctggagatcctcaagcaggtgagtcgacacaatgaccgtccgatcttcggcgagctcaccgaagagggatcgcaccccgatccttgatgccgggtcgaggcctaccgtcggctcatcaagcagtagtacagccggatcgccgacaatcgcacacgcgattccaagtcgttgacgcattccacccgaaagagactggacgcgctcatcggcacggtcaagaagcccaacacgatcgagggctgcacatgccctcgcacggcattcgctcggttcaacgcctcgcgcccaggccgcatattccacggcccgccggatgcggaagtgcgacgggagggaaaaccgctggggcaggaatccgaccaaaccacggatggtgtcgacgtcatcgctgacatcgacaccattcacccgaaagtggccggactccggttcacggagtgtcgcgagaatactgagaagtgtcgactttccggccccatttggaccgagcagcccccacaaaccagagccaaactcacaggaaatatcaacaaggctacgccgatggtggtaacggtgtgatacgtgctcgagttcaatcattcacttagccgtaacgtaacccgatttcgcggatgccatacgacgtcctttctgcagcagaaacatctccaatggaaaacccgctaccgtacccatactttcacttagagtaaggcagtaccaaccttgcggcaaattcggcggtacctaccgcgctcccacaattcttctcagaatcgggtcagtacagcattgccgacgccgggtccgaaaggatctccgcaacgtcgtggaggaatgtcgaaccctgctcaccgtcaataagacgatgatcgaacccgaggctcatcgtcgtcacccacctgggcacaacgcgctcgtcgtcaccggtcccgacgacccacggccgccgagcgagagcaccaagcacgaggatcgctgactctgtccggttgaccacgggagtgccggcatcaagcccgaacaccccgacgttcgtgatcgagaaggtaccgtcggcatagtcgggcgattgcagtttgtcctctttggcgatcgcaacgatccgggtgatctccgtcgccaactcaagcatcgtcatgtcctgggcgtcgcgcaccaccggcaccatgaggccgcgcggcgtggcggcggcaatgccgaggttgatgtggtcacggaagacgatctggtcggtggcgtcatcccatgcggcgttgatgatgggggtgcgccccatcgccaggcacaccgccttgcaccacaccgtcagcggggagacacgcaggcccttgaaacgacggtcggcacgcagccggttgaccagctccatcgtcggggtgacgtcgcaggtgaggaaggccgtcacgagggccttcgtatccaaggactccttcacggccttcgctgtgaccttgcgcaccccacgcactggcaccttgcgggtgtggccgtcgggctcggtcggggcgccaccgaggagacgccgagacatcaccgacaggtttgccagctcggcgtcaccacaagaagcgccggcgtccccggctgcagcagcgccatcatgagcggccgctttgacgtcactcctcgtcactgcaccctgcggaccggtgccggtcacctgggacaggtcgatgccgaggtctgctgccaatcgtcgggccggcggcttggcaaggatgtgcgcggtgcggtccatgcgcggtgggtcttgacgagaagccgactcggttagacgctgctccggtttcgcctcggcgtcgtgttgaggttccgaaaccgattgctcaggatgagtgtct

SEQ ID NO: 81 - DNA, 2055 bp, Propionibacterium acnes
  source 1..2055: mol_type = genomic DNA
ctcgtcgagacggatgacctcggtagcctgcagcgcccctaacacaactcgctgcgacgcctcaccccatgctttgaacacctcgtggccggcctccgggtccaccgcgatgttccactcgctcgtcggcccggtgttgccacgatgattgatcgccccacccatgacgtgcagcccccgcaacaaccgcggcaattccggttcttcccgcagcgccagcgcgaggttcgtcaacggcccggtgacgatacccaccaacttccccgggtattggcgcgcgagatcaacccacagttgtgccccgctacgcgaatccgggtgacgcccgcactcccttagcacagcgtgccccaacccgtgcggcccgtgggtctcctcggcggtcatgagaggctcgacgagcggaacgtccgcccctcgggcaaccggcacgtccattccgagcagatcagtcaacccaagcgcgtttcgcagtacgtcgtcctgccccacgttgccggcagtcgtcaccaccccgacggtctcaacgtcgtcacggcaggccaggtaggccagagcgaaggcgtcgtcgatacccggatcgcagtccaataagacgggcagggagcgcgtagaggtcggcatgtcgccacactaaggcttcgaccgttgaggcgtcaccctccgatgagtccaccaaacttgtagcgggattcatgaaaaacgccggggaacagaccgtgctccatccccgcgatgatgaactcaattttaagatcgagattcccgcgctcccccatgtcctgcattccgaatagttcgggcagctctccagcgatcctcacaaatttgtccaatccggtgcgaccttcttcatcacaggtcatgtacggctggaccgacatgtacgtctccaaggccgtgtcccccgcgaaatccagggcgaaggctgccccttccttgcccccggggataccgagtgcggccaacctctcaacgatcgccgtgattcgcggcagagctactccgaaggcttcaggccgggtgacgataacggcggccgcctccgaatagcggacacacatctgccactgccgatccacgacatcgcgcagcacgtcctgccaggtgcacaactgcggatccggttcgatgtcggcagctatcgcgctgatcgcggcaagctgcaactcctgacgggaactgaactcccggtacaaggcagtggccttcactccaaggcgctcagcaaccgctcgaagagtgaaactgccaattccttcagctagagtcgcgtcaatgacctgacgtcgtgtgaacgcaggtttacgccccggccgttttctcatcacggccgacccacgagcgaccaccccacagcccgttcccgggcatgccacagatcggcatacaggccgctgctggcaatgaggtcgtcatgggttcccacttgacaaaccctaccagtgcgatcgacgacgactatctgatctgcggaacgaatggtgtcgagcttgtgggcgataacgacaattgtcgatgtctgtcgcagctgggtcacagcggcctcgacatgggcctcgttctccggatccaaggccgaggtggcctcgtcgaaaagcagaatcggggcgcgtttgagcaaggcccgagctaccgacacccgctgacgttcgccacccgaaagccgacgacccccttctccgacgctggcatcccagccgcccggaagacgatcagcaatctcgtcgacaccggccagggctccggcctgacgcacgtgctcatcggtagcgtccgggcaaccgatgcggatattttccgtcagggtggagtcatagaggtacacatcctgaaacaccatggcaagctgactcatgagctgttcggtagtctgatcgcggacatcgaccccaccaactcgcaccgttccggaattagcatcccagaacctggcaatgagccggaacagggtggacttgccagcgcccgaggggccgacgatagccatcagtccgccggccggaacagtgaacgagacatcgtggaggaccgggcgagccggatcgtagccga

SEQ ID NO: 82 - DNA, 6363 bp, Propionibacterium acnes; identical to SEQ ID NO: 29
  source 1..6363: mol_type = genomic DNA

SEQ ID NO: 83 - DNA, 6363 bp, Propionibacterium acnes
  source 1..6363: mol_type = genomic DNA
gtgttgtggactctcggggtcagtctgtccgctcacttgagatggcttaacatttctgaccgacgccgaagtctacgaacgctgcgaaacgccaaccgacgcctttgcaaccaagccttcttcatcaagatctacatcgacgaagacgaccaactccgcgtcgagaacaaccgacctttcgaaatgctcctcgaccctcagatcaacgccaacgccctcacctgggcccagaacggcaacaaggcccgaatcgaaactaaggggttcgagccttgtgcgtggggttacttagacgttcattttgatacaaggatctgggtgggtgcacggaggggctaggtgggtgcattgcatcctgacaggagcgccgggtgagttctggttgactaccagcagcgtgttcggtatgctagaggatagttacgcgacagcgtccgttccaatttctgggagtgtgttaattccgatggtgctgtgatctccgttcggctacgccgagaagcgtccaaatgtttcgacggttttggggatcaatatgtctgctatcgaggtaatcaatctttctttttcattttccgctcagccactcttggataacgtttcattcagcgttggcgatagcgagcgcgcagtacttgtggggcctaatggctctggcaaaaccactctcctgcgcctgatacgaggagagctaaccccggatcgaggacatatcgccatcagtgatgcaggagatgcaggttcttgtcgcttcccttatgttcgtgacgccactggcacagttcaggactatctggacgacgtgttggctggcccatgggagttgctcactcgcttcgaccacgtgacgaagcaactatcggctgcccaaagttcagcgagtctcgctaaagagtacgatcacatactcaccagtcttactctggccgacgtatggtcgctcgaagctcgaatcgatgaagtgttagccggtttaggtctaggccagctgaccggacgcggtcgacagcgcgcactcggctcactctcccctggccaggcagtgcggctcgaactggcaggcatcattatggtcagaccagtaactctggtcttggatgaacccaccaatcatcttgatgacgaagccgtaggctttctgatccagcaaataacagattggccggggccagtgctcatggccagtcataatcgtgcgtttattgaagagacagccacggtcatctatgacctcgatattgccccgtggcaggctttggccacagctgaaggagaggctgtgtctggcgtgtaccggtgcactggcgcctatagtgattatcttggcgccaaacaacacgcccgcatggagcatcaaaagcttcacgccacccagcaatctgaaaaacgcgcgattcgaagtcatcgccgtcgtagcgaagatatcgctcgtggtggagtgaaattagcgaaggcgcagggcatggcacgtaagttcttctctgaccgggcagaaaagaccgcgctgcgacgcacgcgtaacgacgatcaacgcttacacgatcttgctgaacatgaggtgcgaaaaccccgcaactaccaacttaagctcaaccttccaccagtcggctcgcgtggcgggttagccgtcacggcacgaagcgccttcattccaggcaggcttctcccaatcacgttcgaccttgccacgggggaacatttaatactgactggcccgaatggagcggggaaaaccacgctcttgaattggcttgctagtgggaaaacaacaatcgaccctagatccgaagccagcggcactatctctgtcagcgggcggcttgcttacgtcccacagcgcctaccacgcacaggagattcctactttcacccagaacattggaaagacgggatcagagaacttggcacgggaatactccacccatccatgtgggccaccccagtcggccaactttcagatggaaaccagcgtcgagcccagatcgcgttagccgtggcgcagaaacccgagattcttgtcattgacgaaccaaccaactacctcgacctcgccacgcttgaagaactagaggacgcgctacgccaatggaacggcacactcatcatcgccagtcacgaccgctggcttatcaaccactggcagggaacacaaatcgaattatgccccacagatccagcgcccggatcaccgaatcccctcttactcgttaagagccggttcgagccgtggtagtgccgtccttgagtgtgagtttgatagcgccgtcgtggttgacggtggtgtgatcgacgagggtgttccaggcttggtcggagtattcgagtggtggttgggtggcaaggtagtcgcgtacttcgattgcttgtgctcggcggtggcgcagatcgtcgatctggtcgctgatccgttgatgctcggcctcaagttggtggtgccgatcttcaagctcgtggtaacggcggtcgtagtcgtcagggtcgtgggcggtcgtggctgcggggtgatgagttggttcatcagcgtgatggtttcttcgatccgctcccccagcgtggcctgcttggtttcgagctcgcgggtgtcgtagacggtttcgtcgagcaggcgcatggtgtcatcgagcacgtcgttgccggtgacccgcttagccagggctgcgacgaaggcgtctttgatctggtcttcggtgacgtggggtgtcgcgcagtgatgatccttgttgtatttgttgttgcagcgccagatgtagcggcggtatttgctggtggagtgccagactttccgcccaaacctcccgccgcaatcggagcaggtgatcgtgttggcgaaggggtgggtgttggaggtgcctttgcctgcgcggcgggcgagttctgcttggacggtgtcccaggtgacgggatcaatgatgggttcgtggttgctggtgacgtagtactggggtacttcgccttcgttgattttcatggtttggttaggaagtcggtggtgaagctcttttgcagcagcgcgtcgcctttgtatttctcgttggcaaggatcgaccgcacagtggagggcgaccagatttgtttgccacgcggggtggggatgccatcggatgtgaattctttggcgatggtttgtggggttgcgccttcgaggaagcgggcataaatacgacggacggttggtgcttgggtttcgtcgatggcgaggttgccgtcttcgcctttcttgtagccgagcagggacgcgtaggacaccatgattttcccgtcggcgaagcgtttacggtggtcccaggtgacattctcggaaatggagcgggattcttcttgggtgaggctggacatgatggtgatgagtagttcgcctttggaatcgagtgtccagatgttttctttttcgaagtagacctctacgcctttgtctttgagctggcggacgtggatgagggtgtcgacggtgttgcgggcgaaccgggacacgctcttggtgaggatcaaatcgatttttccggcgagggtgtcggcgatcatggttttgaagccttcacggtgtttggtgctggtgccagtgatgccttcgtcggcgtacatgcctgcgaattcccactctgtgcgggattggatgtggctcgtgtagtagtcgatttgtgcctcgtaggaggaggcttgttcttccatctcggtggatacccgcgcgtaggccgctaccctgcgccgacgccgagtaccctgcaccgtggtgtgtccgggtatttttgtggctgggatcgcggtgacacgcttgttccgaatctgcttggtggtcatatcgcactttcctcgtccaggctcaccgccactggcacttcgccgctaatggtgtggatggtgagcgtacgatcgggattgacaacgattttcacgaggcgcgtcagcgcatactcgtcgtcccagtcgtcgaggccaagcacgcgggtgcagatctgggtgagatgggtttctcggatttgtggtgcctggcagggattgcctttacctttggtggcggtttcgcaccaccaaaacttgtaggacgtgtggcggcgtgtcttggtgcggcggtgataaaacctgctacagacagagcattcaatccgagaggtgagcccggtcgttctagctgacggcgtggctccacgtccgagatgtctgcgccgggcgagctcggcctggacggcgccgaacgtggtctggtcgatgatgggcgggtgggattcgtcgacgaggtagcgtggcagctcgccggtgttggtatggcagttcaattctgcaacgtttggccggtaatacttttgcaggattacgcggccggtgtagatttcattttcgagccatttgcggatcgtcttaccgcgaaacttggctccccgcctaggcttgaccccttcagcattcaactgactgatgatcttggcttcagtctcgatgatagccaagtcactacccacgtattggtagccgtagggttggcgcgaatgcatgagcccgtcggcgtatttcttccttatcccccatttaacattcttcgacatggatcgagattcctcctgcgcaaacgatgccagcagggtcagcaggagttcaccgtcagcggtcgcggtatcgatctgttcacgctcgaaacgcactgagacgccgaggattttgagttcgcggacggcatcgagcaggtcgacggtgttgcgagtcagcctggatatcgacttcgtcaaaatcatgtcgatgtcgccggagcgggcggcggccatcatggtctggaacccctctcgacggacggtactggtgccggtgatgccttcgtcgatgaacacgcctgcatagtcccaaccaggggtggattgaatcagatgagagtagtacgacacctgggcggcaatcgaagatagctggcgttcgtgctcggtcgatacccgcgcataccctgctactcgtagccgacgtggcgtggcgggtctaggtgggataactcgaaaactacgcgaggtcactccctgcttctctttcttctatggcgacaggtgttttggttgtatccatctacgctctaaacctgagtcttatccagtcgaacctgcagcaacaatgcccccactggcgcggttgcttcatgcccgatccgcgtaaggatcacgtggctttcgtttggggtgagtgcgccggtttcggtgagccgatcaataaaggcgacctggcgggcaagatcgacttcggcattgaacatggcacccgtcacggtctgccacctcgggtgctgaagcggtgcctgatatagcaggcatgcgagcaatacttacggtgcttgtttccgtaggcctcgaagctctcaccgcaagcaacgcaggtgaaggtgtatattgcccgccggttgagccgttcggggtgggcgtgctaccacgacaaacgacacacatccgaacagaacctttgccccgccaccgcagcttcaaaatgcccattacagtgttcgcatgccttagcaggctcaacatcaaccgccggatcgatgttgatgtcagctctgcgacagatcgacttcaccgtattgcgcgacatgcccaatctggtggcgatctgcccatacgatgcgcctcggcatcgcagctccacaactcgctcacgggtaatctcacgtgccatgacgcgctcctgctcaatagaaataaggtctctactgacagggcttcgacccaccccgatttataaccaccactgtcctggtgcgatgggaacaaaaatggccccgccaccacctcatgtagtgaggcagcgacggggcgaaacaggacagttttcatgagtcttggtttagtggcggagtttttcgttgacccggcgctggacggcgtcgtagttggatccgagtctgcgtcggcgttcgttgccgttgccgtattcgccgcggatgaccgcgtcagcgagcgcgtcaatgttcggtgccggcttcggtgtgggtgcgggtttcggtgccggcgcgggtgcgggcgtgttgccggtcatgtggtcgtaccagtactgggcgcgagccatataggcggcgtgctgagtaccggccagcgatgctgggcattcggtggctgagaagtttttgtgcccgaacacgttcttaccccaggtagggcggccgagcttgtaataccgacagatcgcggccaccaaatgtgcgccgttgtcgaggcaggcgtcagagattttccatgggttagaagaggcgtcggcgtgctcgataccaatgctggtggtattggctgcccagtttccggcgtgccaggcggtgtcgcggtcccacacgagctgcccgatccgcccggaggtttctacctggtagtgggcggaggcgggccgggtctgccacac

SEQ ID NO: 84 - DNA, 6363 bp, Propionibacterium acnes; identical to SEQ ID NO: 83
  source 1..6363: mol_type = genomic DNA

SEQ ID NO: 85 - DNA, 6363 bp, Propionibacterium acnes; identical to SEQ ID NO: 83
  source 1..6363: mol_type = genomic DNA

SEQ ID NO: 86 - DNA, 6363 bp, Propionibacterium acnes; identical to SEQ ID NO: 83
  source 1..6363: mol_type = genomic DNA

SEQ ID NO: 87 - DNA, 6363 bp, Propionibacterium acnes; identical to SEQ ID NO: 83
  source 1..6363: mol_type = genomic DNA

SEQ ID NO: 88 - DNA, 6363 bp, Propionibacterium acnes; identical to SEQ ID NO: 83
  source 1..6363: mol_type = genomic DNA

SEQ ID NO: 89 - DNA, 6363 bp, Propionibacterium acnes; identical to SEQ ID NO: 83
  source 1..6363: mol_type = genomic DNA

SEQ ID NO: 90 - DNA, 6363 bp, Propionibacterium acnes; identical to SEQ ID NO: 83
  source 1..6363: mol_type = genomic DNA

SEQ ID NO: 91 - DNA, 6363 bp, Propionibacterium acnes; identical to SEQ ID NO: 83
  source 1..6363: mol_type = genomic DNA

SEQ ID NO: 92 - DNA, 6363 bp, Propionibacterium acnes; identical to SEQ ID NO: 83
  source 1..6363: mol_type = genomic DNA

SEQ ID NO: 93 - DNA, 6363 bp, Propionibacterium acnes
  source 1..6363: mol_type = genomic DNA
gtgttgtggactctcggggtcagtctgtccgctcacttgagatggcttaacatttctgaccgacgccgaagtctacgaacgctgcgaaacgccaaccgacgcctttgcaaccaagccttcttcatcaagatctacatcgacgaagacgaccaactccgcgtcgagaacaaccgacctttcgaaatgctcctcgaccctcagatcaacgccaacgccctcacctgggcccagaacggcaacaaggcccgaatcgaaactaaggggttcgagccttgtgcgtggggttacttagacgttcattttgatacaaggatctgggtgggtgcacggaggggctaggtgggtgcattgcatcctgacaggagcgccgggtgagttctggttgactaccagcagcgtgttcggtatgctagaggatagttacgcgacagcgtccgttccaatttctgggagtgtgttaattccgatggtgctgtgatctccgttcggctacgccgagaagcgtccaaatgtttcgacggttttggggatcaatatgtctgctatcgaggtaatcaatctttctttttcattttccgctcagccactcttggataacgtttcattcagcgttggcgatagcgagcgcgcagtacttgtggggcctaatggctctggcaaaaccactctcctgcgcctgatacgaggagagctaaccccggatcgaggacatatcgccatcagtgatgcaggagatgcaggttcttgtcgcttcccttatgttcgtgacgccactggcacagttcaggactatctggacgacgtgttggctggcccatgggagttgctcactcgcttcgaccacgtgacgaagcaactatcggctgcccaaagttcagcgagtctcgctaaagagtacgatcacatactcaccagtcttactctggccgacgtatggtcgctcgaagctcgaatcgatgaagtgttagccggtttaggtctaggccagctgaccggacgcggtcgacagcgcgcactcggctcactctcccctggccaggcagtgcggctcgaactggcaggcatcattatggtcagaccagtaactctggtcttggatgaacccaccaatcatcttgatgacgaagccgtaggctttctgatccagcaaataacagattggccggggccagtgctcatggccagtcataatcgtgcgtttattgaagagacagccacggtcatctatgacctcgatattgccccgtggcaggctttggccacagctgaaggagaggctgtgtctggcgtgtaccggtgcactggcgcctatagtgattatcttggcgccaaacaacacgcccgcatggagcatcaaaagcttcacgccacccagcaatctgaaaaacgcgcgattcgaagtcatcgccgtcgtagcgaagatatcgctcgtggtggagtgaaattagcgaaggcgcagggcatggcacgtaagttcttctctgaccgggcagaaaagaccgcgctgcgacgcacgcgtaacgacgatcaacgcttacacgatcttgctgaacatgaggtgcgaaaaccccgcaactaccaacttaagctcaaccttccaccagtcggctcgcgtggcgggttagccgtcacggcacgaagcgccttcattccaggcaggcttctcccaatcacgttcgaccttgccacgggggaacatttaatactgactggcccgaatggagcggggaaaaccacgctcttgaattggcttgctagtgggaaaacaacaatcgaccctagatccgaagccagcggcactatctctgtcagcgggcggcttgcttacgtcccacagcgcctaccacgcacaggagattcctactttcacccagaacattggaaagacgggatcagagaacttggcacgggaatactccacccatccatgtgggccaccccagtcggccaactttcagatggaaaccagcgtcgagcccagatcgcgttagccgtggcgcagaaacccgagattcttgtcattgacgaaccaaccaactacctcgacctcgccacgcttgaagaactagaggacgcgctacgccaatggaacggcacactcatcatcgccagtcacgaccgctggcttatcaaccactggcagggaacacaaatcgaattatgccccacagatccagcgcccggatcaccgaatcccctcttactcgttaagagccggttcgagccgtggtagtgccgtccttgagtgtgagtttgatagcgccgtcgtggttgacggtggtgtgatcgacgagggtgttccaggcttggtcggagtattcgagtggtggttgggtggcaaggtagtcgcgtacttcgattgcttgtgctcggcggtggcgcagatcgtcgatctggtcgctgatccgttgatgctcggcctcaagttggtggtgccgatcttcaagctcgtggtaacggcggtcgtagtcgtcagggtcgtgggcggtcgtggctgcggggtgatgagttggttcatcagcgtgatggtttcttcgatccgctcccccagcgtggcctgcttggtttcgagctcgcgggtgtcgtagacggtttcgtcgagcaggcgcatggtgtcatcgagcacgtcgttgccggtgacccgcttagccagggctgcgacgaaggcgtctttgatctggtcttcggtgacgtggggtgtcgcgcagtgatgatccttgttgtatttgttgttgcagcgccagatgtagcggcggtatttgctggtggagtgccagactttccgcccaaacctcccgccgcaatcggagcaggtgatcgtgttggcgaaggggtgggtgttggaggtgcctttgcctgcgcggcgggcgagttctgcttggacggtgtcccaggtgacgggatcaatgatgggttcgtggttgctggtgacgtagtactggggtacttcgccttcgttgattttcatggtttggttaggaagtcggtggtgaagctcttttgcagcagcgcgtcgcctttgtatttctcgttggcaaggatcgaccgcacagtggagggcgaccagatttgtttgccacgcggggtggggatgccatcggatgtgaattctttggcgatggtttgtggggttgcgccttcgaggaagcgggcataaatacgacggacggttggtgcttgggtttcgtcgatggcgaggttgccgtcttcgcctttcttgtagccgagcagggacgcgtaggacaccatgattttcccgtcggcgaagcgtttacggtggtcccaggtgacattctcggaaatggagcgggattcttcttgggtgaggctggacatgatggtgatgagtagttcgcctttggaatcgagtgtccagatgttttctttttcgaagtagacctctacgcctttgtctttgagctggcggacgtggatgagggtgtcgacggtgttgcgggcgaaccgggacacgctcttggtgaggatcaaatcgatttttccggcgagggtgtcggcgatcatggttttgaagccttcacggtgtttggtgctggtgccagtgatgccttcgtcggcgtacatgcctgcgaattcccactctgtgcgggattggatgtggctcgtgtagtagtcgatttgtgcctcgtaggaggaggcttgttcttccatctcggtggatacccgcgcgtaggccgctaccctgcgccgacgccgagtaccctgcaccgtggtgtgtccgggtatttttgtggctgggatcgcggtgacacgcttgttccgaatctgcttggtggtcatatcgcactttcctcgtccaggctcaccgccactggcacttcgccgctaatggtgtggatggtgagcgtacgatcgggattgacaacgattttcacgaggcgcgtcagcgcatactcgtcgtcccagtcgtcgaggccaagcacgcgggtgcagatctgggtgagatgggtttctcggatttgtggtgcctggcagggattgcctttacctttggtggcggtttcgcaccaccaaaacttgtaggacgtgtggcggcgtgtcttggtgcggcggtgataaaacctgctacagacagagcattcaatccgagaggtgagcccggtcgttctagctgacggcgtggctccacgtccgagatgtctgcgccgggcgagctcggcctggacggcgccgaacgtggtctggtcgatgatgggcgggtgggattcgtcgacgaggtagcgtggcagctcgccggtgttggtatggcagttcaattctgcaacgtttggccggtaatacttttgcaggattacgcggccggtgtagatttcattttcgagccatttgcggatcgtcttaccgcgaaacttggctccccgcctaggcttgaccccttcagcattcaactgactgatgatcttggcttcagtctcgatgatagccaagtcactacccacgtattggtagccgtagggttggcgcgaatgcatgagcccgtcggcgtatttcttccttatcccccatttaacattcttcgacatggatcgagattcctcctgcgcaaacgatgccagcagggtcagcaggagttcaccgtcagcggtcgcggtatcgatctgttcacgctcgaaacgcactgagacgccgaggattttgagttcgcggacggcatcgagcaggtcgacggtgttgcgagtcagcctggatatcgacttcgtcaaaatcatgtcgatgtcgccggagcgggcggcggccatcatggtctggaacccctctcgacggacggtactggtgccggtgatgccttcgtcgatgaacacgcctgcatagtcccaaccaggggtggattgaatcagatgagagtagtacgacacctgggcggcaatcgaagatagctggcgttcgtgctcggtcgatacccgcgcataccctgctactcgtagccgacgtggcgtggcggggctaggtgggataactcgaaaactacgcgaggtcactccctgcttctctttcttctatggcgacaggtgttttggttgtatccatctacgctctaaacctgagtcttatccagtcgaacctgcagcaacaatgcccccactggcgcggttgcttcatgcccgatccgcgtaaggatcacgtggctttcgtttggggtgagtgcgccggtttcggtgagccgatcaataaaggcgacctggcgggcaagatcgacttcggcattgaacatggcacccgtcacggtctgccacctcgggtgctgaagcggtgcctgatatagcaggcatgcgagcaatacttacggtgcttgtttccgtaggcctcgaagctctcaccgcaagcaacgcaggtgaaggtgtatattgcccgccggttgagccgttcggggtgggcgtgctaccacgacaaacgacacacatccgaacagaacctttgccccgccaccgcagcttcaaaatgcccattacagtgttcgcatgccttagcaggctcaacatcaaccgccggatcgatgttgatgtcagctctgcgacagatcgacttcaccgtattgcgcgacatgcccaatctggtggcgatctgcccatacgatgcgcctcggcatcgcagctccacaactcgctcacgggtaatctcacgtgccatgacgcgctcctgctcaatagaaataaggtctctactgacagggcttcgacccaccccgatttataaccaccactgtcctggtgcgatgggaacaaaaatggccccgccaccacctcatgtagtgaggcagcgacggggcgaaacaggacagttttcatgagtcttggtttagtggcggagtttttcgttgacccggcgctggacggcgtcgtagttggatccgagtctgcgtcggcgttcgttgccgttgccgtattcgccgcggatgaccgcgtcagcgagcgcgtcaatgttcggtgccggcttcggtgtgggtgcgggtttcggtgccggcgcgggtgcgggcgtgttgccggtcatgtggtcgtaccagtactgggcgcgagccatataggcggcgtgctgagtaccggccagcgatgctgggcattcggtggctgagaagtttttgtgcccgaacacgttcttaccccaggtagggcggccgagcttgtaataccgacagatcgcggccaccaaatgtgcgccgttgtcgaggcaggcgtcagagattttccatgggttagaagaggcgtcggcgtgctcgataccaatgctggtggtattggctgcccagtttccggcgtgccaggcggtgtcgcggtcccacacgagctgcccgatccgcccggaggtttctacctggtagtgggcggaggcgggccgggtctgccacac

SEQ ID NO: 94 - DNA, 6363 bp, Propionibacterium acnes
  source 1..6363: mol_type = genomic DNA
gtgttgtggactctcggggtcagtctgtccgctcacttgagatggcttaacatttctgaccgacgccgaagtctacgaacgctgcgaaacgccaaccgacgcctttgcaaccaagccttcttcatcaagatctacatcgacgaagacgaccaactccgcgtcgagaacaaccgacctttcgaaatgctcctcgaccctcagatcaacgccaacgccctcacctgggcccagaacggcaacaaggcccgaatcgaaactaaggggttcgagccttgtgcgtggggttacttagacgttcattttgatacaaggatctgggtgggtgcacggaggggctaggtgggtgcattgcatcctgacaggagcgccgggtgagttctggttgactaccagcagcgtgttcggtatgctagaggatagttacgcgacagcgtccgttccaatttctgggagtgtgttaattccgatggtgctgtgatctccgttcggctacgccgagaagcgtccaaatgtttcgacggttttggggatcaatatgtctgctatcgaggtaatcaatctttctttttcattttccgctcagccactcttggataacgtttcattcagcgttggcgatagcgagcgcgcagtacttgtggggcctaatggctctggcaaaaccactctcctgcgcctgatacgaggagagctaaccccggatcgaggacatatcgccatcagtgatgcaggagatgcaggttcttgtcgcttcccttatgttcgtgacgccactggcacagttcaggactatctggacgacgtgttggctggcccatgggagttgctcactcgcttcgaccacgtgacgaagcaactatcggctgcccaaagttcagcgagtctcgctaaagagtacgatcacatactcaccagtcttactctggccgacgtatggtcgctcgaagctcgaatcgatgaagtgttagccggtttaggtctaggccagctgaccggacgcggtcgacagcgcgcactcggctcactctcccctggccaggcagtgcggctcgaactggcaggcatcattatggtcagaccagtaactctggtcttggatgaacccaccaatcatcttgatgacgaagccgtaggctttctgatccagcaaataacagattggccggggccagtgctcatggccagtcataatcgtgcgtttattgaagagacagccacggtcatctatgacctcgatattgccccgtggcaggctttggccacagctgaaggagaggctgtgtctggcgtgtaccggtgcactggcgcctatagtgattatcttggcgccaaacaacacgcccgcatggagcatcaaaagcttcacgccacccagcaatctgaaaaacgcgcgattcgaagtcatcgccgtcgtagcgaagatatcgctcgtggtggagtgaaattagcgaaggcgcagggcatggcacgtaagttcttctctgaccgggcagaaaagaccgcgctgcgacgcacgcgtaacgacgatcaacgcttacacgatcttgctgaacatgaggtgcgaaaaccccgcaactaccaacttaagctcaaccttccaccagtcggctcgcgtggcgggttagccgtcacggcacgaagcgccttcattccaggcaggcttctcccaatcacgttcgaccttgccacgggggaacatttaatactgactggcccgaatggagcggggaaaaccacgctcttgaattggcttgctagtgggaaaacaacaatcgaccctagatccgaagccagcggcactatctctgtcagcgggcggcttgcttacgtcccacagcgcctaccacgcacaggagattcctactttcacccagaacattggaaagacgggatcagagaacttggcacgggaatactccacccatccatgtgggccaccccagtcggccaactttcagatggaaaccagcgtcgagcccagatcgcgttagccgtggcgcagaaacccgagattcttgtcattgacgaaccaaccaactacctcgacctcgccacgcttgaagaactagaggacgcgctacgccaatggaacggcacactcatcatcgccagtcacgaccgctggcttatcaaccactggcagggaacacaaatcgaattatgccccacagatccagcgcccggatcaccgaatcccctcttactcgttaagagccggttcgagccgtggtagtgccgtccttgagtgtgagtttgatagcgccgtcgtggttgacggtggtgtgatcgacgagggtgttccaggcttggtcggagtattcgagtggtggttgggtggcaaggtagtcgcgtacttcgattgcttgtgctcggcggtggcgcagatcgtcgatctggtcgctgatccgttgatgctcggcctcaagttggtggtgccgatcttcaagctcgtggtaacggcgggcgtagtcgtcagggtcgtgggcggtcgtggctgcggggtgatgagttggttcatcagcgtgatggtttcttcgatccgctcccccagcgtggcctgcttggtttcgagctcgcgggtgtcgtagacggtttcgtcgagcaggcgcatggtgtcatcgagcacgtcgttgccggtgacccgcttagccagggctgcgacgaaggcgtctttgatctggtcttcggtgacgtggggtgtcgcgcagtgatgatccttgttgtatttgttgttgcagcgccagatgtagcggcggtatttgctggtggagtgccagactttccgcccaaacctcccgccgcaatcggagcaggtgatcgtgttggcgaaggggtgggtgttggaggtgcctttgcctgcgcggcgggcgagttctgcttggacggtgtcccaggtgacgggatcaatgatgggttcgtggttgctggtgacgtagtactggggtacttcgccttcgttgattttcatggtttggttaggaagtcggtggtgaagctcttttgcagcagcgcgtcgcctttgtatttctcgttggcaaggatcgaccgcacagtggagggcgaccagatttgtttgccacgcggggtggggatgccatcggatgtgaattctttggcgatggtttgtggggttgcgccttcgaggaagcgggcataaatacgacggacggttggtgcttgggtttcgtcgatggcgaggttgccgtcttcgcctttcttgtagccgagcagggacgcgtaggacaccatgattttcccgtcggcgaagcgtttacggtggtcccaggtgacattctcggaaatggagcgggattcttcttgggtgaggctggacatgatggtgatgagtagttcgcctttggaatcgagtgtccagatgttttctttttcgaagtagacctctacgcctttgtctttgagctggcggacgtggatgagggtgtcgacggtgttgcgggcgaaccgggacacgctcttggtgaggatcaaatcgatttttccggcgagggtgtcggcgatcatggttttgaagccttcacggtgtttggtgctggtgccagtgatgccttcgtcggcgtacatgcctgcgaattcccactctgtgcgggattggatgtggctcgtgtagtagtcgatttgtgcctcgtaggaggaggcttgttcttccatctcggtggatacccgcgcgtaggccgctaccctgcgccgacgccgagtaccctgcaccgtggtgtgtccgggtatttttgtggctgggatcgcggtgacacgcttgttccgaatctgcttggtggtcatatcgcactttcctcgtccaggctcaccgccactggcacttcgccgctaatggtgtggatggtgagcgtacgatcgggattgacaacgattttcacgaggcgcgtcagcgcatactcgtcgtcccagtcgtcgaggccaagcacgcgggtgcagatctgggtgagatgggtttctcggatttgtggtgcctggcagggattgcctttacctttggtggcggtttcgcaccaccaaaacttgtaggacgtgtggcggcgtgtcttggtgcggcggtgataaaacctgctacagacagagcattcaatccgagaggtgagcccggtcgttctagctgacggcgtggctccacgtccgagatgtctgcgccgggcgagctcggcctggacggcgccgaacgtggtctggtcgatgatgggcgggtgggattcgtcgacgaggtagcgtggcagctcgccggtgttggtatggcagttcaattctgcaacgtttggccggtaatacttttgcaggattacgcggccggtgtagatttcattttcgagccatttgcggatcgtcttaccgcgaaacttggctccccgcctaggcttgaccccttcagcattcaactgactgatgatcttggcttcagtctcgatgatagccaagtcactacccacgtattggtagccgtagggttggcgcgaatgcatgagcccgtcggcgtatttcttccttatcccccatttaacattcttcgacatggatcgagattcctcctgcgcaaacgatgccagcagggtcagcaggagttcaccgtcagcggtcgcggtatcgatctgttcacgctcgaaacgcactgagacgccgaggattttgagttcgcggacggcatcgagcaggtcgacggtgttgcgagtcagcctggatatcgacttcgtcaaaatcatgtcgatgtcgccggagcgggcggcggccatcatggtctggaacccctctcgacggacggtactggtgccggtgatgccttcgtcgatgaacacgcctgcatagtcccaaccaggggtggattgaatcagatgagagtagtacgacacctgggcggcaatcgaagatagctggcgttcgtgctcggtcgatacccgcgcataccctgctactcgtagccgacgtggcgtggcgggtctaggtgggataactcgaaaactacgcgaggtcactccctgcttctctttcttctatggcgacaggtgttttggttgtatccatctacgctctaaacctgagtcttatccagtcgaacctgcagcaacaatgcccccactggcgcggttgcttcatgcccgatccgcgtaaggatcacgtggctttcgtttggggtgagtgcgccggtttcggtgagccgatcaataaaggcgacctggcgggcaagatcgacttcggcattgaacatggcacccgtcacggtctgccacctcgggtgctgaagcggtgcctgatatagcaggcatgcgagcaatacttacggtgcttgtttccgtaggcctcgaagctctcaccgcaagcaacgcaggtgaaggtgtatattgcccgccggttgagccgttcggggtgggcgtgctaccacgacaaacgacacacatccgaacagaacctttgccccgccaccgcagcttcaaaatgcccattacagtgttcgcatgccttagcaggctcaacatcaaccgccggatcgatgttgatgtcagctctgcgacagatcgacttcaccgtattgcgcgacatgcccaatctggtggcgatctgcccatacgatgcgcctcggcatcgcagctccacaactcgctcacgggtaatctcacgtgccatgacgcgctcctgctcaatagaaataaggtctctactgacagggcttcgacccaccccgatttataaccaccactgtcctggtgcgatgggaacaaaaatggccccgccaccacctcatgtagtgaggcagcgacggggcgaaacaggacagttttcatgagtcttggtttagtggcggagtttttcgttgacccggcgctggacggcgtcgtagttggatccgagtctgcgtcggcgttcgttgccgttgccgtattcgccgcggatgaccgcgtcagcgagcgcgtcaatgttcggtgccggcttcggtgtgggtgcgggtttcggtgccggcgcgggtgcgggcgtgttgccggtcatgtggtcgtaccagtactgggcgcgagccatataggcggcgtgctgagtaccggccagcgatgctgggcattcggtggctgagaagtttttgtgcccgaacacgttcttaccccaggtagggcggccgagcttgtaataccgacagatcgcggccaccaaatgtgcgccgttgtcgaggcaggcgtcagagattttccatgggttagaagaggcgtcggcgtgctcgataccaatgctggtggtattggctgcccagtttccggcgtgccaggcggtgtcgcggtcccacacgagctgcccgatccgcccggaggtttctacctggtagtgggcggaggcgggccgggtctgccacac

SEQ ID NO: 95 - DNA, 6363 bp, Propionibacterium acnes
  source 1..6363: mol_type = genomic DNA
gtgttgtggactctcggggtcagtctgtccgctcacttgagatggcttaacatttctgaccgacgccgaagtctacgaacgctgcgaaacgccaaccgacgcctttgcaaccaagccttcttcatcaagatctacatcgacgaagacgaccaactccgcgtcgagaacaaccgacctttcgaaatgctcctcgaccctcagatcaacgccaacgccctcacctgggcccagaacggcaacaaggcccgaatcgaaactaaggggttcgagccttgtgcgtggggttacttagacgttcattttgatacaaggatctgggtgggtgcacggaggggctaggtgggtgcattgcatcctgacaggagcgccgggtgagttctggttgactaccagcagcgtgttcggtatgctagaggatagttacgcgacagcgtccgttccaatttctgggagtgtgttaattccgatggtgctgtgatctccgttcggctacgccgagaagcgtccaaatgtttcgacggttttggggatcaatatgtctgctatcgaggtaatcaatctttctttttcattttccgctcagccactcttggataacgtttcattcagcgttggcgatagcgagcgcgcagtacttgtggggcctaatggctctggcaaaaccactctcctgcgcctgatacgaggagagctaaccccggatcgaggacatatcgccatcagtgatgcaggagatgcaggttcttgtcgcttcccttatgttcgtgacgccactggcacagttcaggactatctggacgacgtgttggctggcccatgggagttgctcactcgcttcgaccacgtgacgaagcaactatcggctgcccaaagttcagcgagtctcgctaaagagtacgatcacatactcaccagtcttactctggccgacgtatggtcgctcgaagctcgaatcgatgaagtgttagccggtttaggtctaggccagctgaccggacgcggtcgacagcgcgcactcggctcactctcccctggccaggcagtgcggctcgaactggcaggcatcattatggtcagaccagtaactctggtcttggatgaacccaccaatcatcttgatgacgaagccgtaggctttctgatccagcaaataacagattggccggggccagtgctcatggccagtcataatcgtgcgtttattgaagagacagccacggtcatctatgacctcgatattgccccgtggcaggctttggccacagctgaaggagaggctgtgtctggcgtgtaccggtgcactggcgcctatagtgattatcttggcgccaaacaacacgcccgcatggagcatcaaaagcttcacgccacccagcaatctgaaaaacgcgcgattcgaagtcatcgccgtcgtagcgaagatatcgctcgtggtggagtgaaattagcgaaggcgcagggcatggcacgtaagttcttctctgaccgggcagaaaagaccgcgctgcgacgcacgcgtaacgacgatcaacgcttacacgatcttgctgaacatgaggtgcgaaaaccccgcaactaccaacttaagctcaaccttccaccagtcggctcgcgtggcgggttagccgtcacggcacgaagcgccttcattccaggcaggcttctcccaatcacgttcgaccttgccacgggggaacatttaatactgactggcccgaatggagcggggaaaaccacgctcttgaattggcttgctagtgggaaaacaacaatcgaccctagatccgaagccagcggcactatctctgtcagcgggcggcttgcttacgtcccacagcgcctaccacgcacaggagattcctactttcacccagaacattggaaagacgggatcagagaacttggcacgggaatactccacccatccatgtgggccaccccagtcggccaactttcagatggaaaccagcgtcgagcccagatcgcgttagccgtggcgcagaaacccgagattcttgtcattgacgaaccaaccaactacctcgacctcgccacgcttgaagaactagaggacgcgctacgccaatggaacggcacactcatcatcgccagtcacgaccgctggcttatcaaccactggcagggaacacaaatcgaattatgccccacagatccagcgcccggatcaccgaatcccctcttactcgttaagagccggttcgagccgtggtagtgccgtccttgagtgtgagtttgatagcgccgtcgtggttgacggtggtgtgatcgacgagggtgttccaggcttggtcggagtattcgagtggtggttgggtggcaaggtagtcgcgtacttcgattgcttgtgctcggcggtggcgcagatcgtcgatctggtcgctgatccgttgatgctcggcctcaagttggtggtgccgatcttcaagctcgtggtaacggcggtcgtagtcgtcagggtcgtgggcggtcgtggctgcggggtgatgagttggttcatcagcgtgatggtttcttcgatccgctcccccagcgtggcctgcttggtttcgagctcgcgggtgtcgtagacggtttcgtcgagcaggcgcatggtgtcatcgagcacgtcgttgccggtgacccgcttagccagggctgcgacgaaggcgtctttgatctggtcttcggtgacgtggggtgtcgcgcagtgatgatccttgttgtatttgttgttgcagcgccagatgtagcggcggtatttgctggtggagtgccagactttccgcccaaacctcccgccgcaatcggagcaggtgatcgtgttggcgaaggggtgggtgttggaggtgcctttgcctgcgcggcgggcgagttctgcttggacggtgtcccaggtgacgggatcaatgatgggttcgtggttgctggtgacgtagtactggggtacttcgccttcgttgattttcatggtttggttaggaagtcggtggtgaagctcttttgcagcagcgcgtcgcctttgtatttctcgttggcaaggatcgaccgcacagtggagggcgaccagatttgtttgccacgcggggtggggatgccatcggatgtgaattctttggcgatggtttgtggggttgcgccttcgaggaagcgggcataaatacgacggacggttggtgcttgggtttcgtcgatggcgaggttgccgtcttcgcctttcttgtagccgagcagggacgcgtaggacaccatgattttcccgtcggcgaagcgtttacggtggtcccaggtgacattctcggaaatggagcgggattcttcttgggtgaggctggacatgatggtgatgagtagttcgcctttggaatcgagtgtccagatgttttctttttcgaagtagacctctacgcctttgtctttgagctggcggacgtggatgagggtgtcgacggtgttgcgggcgaaccgggacacgctcttggtgaggatcaaatcgatttttccggcgagggtgtcggcgatcatggttttgaagccttcacggtgtttggtgctggtgccagtgatgccttcgtcggcgtacatgcctgcgaattcccactctgtgcgggattggatgtggctcgtgtagtagtcgatttgtgcctcgtaggaggaggcttgttcttccatctcggtggatacccgcgcgtaggccgctaccctgcgccgacgccgagtaccctgcaccgtggtgtgtccgggtatttttgtggctgggatcgcggtgacacgcttgttccgaatctgcttggtggtcatatcgcactttcctcgtccaggctcaccgccactggcacttcgccgctaatggtgtggatggtgagcgtacgatcgggattgacaacgattttcacgaggcgcgtcagcgcatactcgtcgtcccagtcgtcgaggccaagcacgcgggtgcagatctgggtgagatgggtttctcggatttgtggtgcctggcagggattgcctttacctttggtggcggtttcgcaccaccaaaacttgtaggacgtgtggcggcgtgtcttggtgcggcggtgataaaacctgctacagacagagcattcaatccgagaggtgagcccggtcgttctagctgacggcgtggctccacgtccgagatgtctgcgccgggcgagctcggcctggacggcgccgaacgtggtctggtcgatgatgggcgggtgggattcgtcgacgaggtagcgtggcagctcgccggtgttggtatggcagttcaattctgcaacgtttggccggtaatacttttgcaggattacgcggccggtgtagatttcattttcgagccatttgcggatcgtcttaccgcgaaacttggctccccgcctaggcttgaccccttcagcattcaactgactgatgatcttggcttcagtctcgatgatagccaagtcactacccacgtattggtagccgtagggttggcgcgaatgcatgagcccgtcggcgtatttcttccttatcccccatttaacattcttcgacatggatcgagattcctcctgcgcaaacgatgccagcagggtcagcaggagttcaccgtcagcggtcgcggtatcgatctgttcacgctcgaaacgcactgagacgccgaggattttgagttcgcggacggcatcgagcaggtcgacggtgttgcgagtcagcctggatatcgacttcgtcaaaatcatgtcgatgtcgccggagcgggcggcggccatcatggtctggaacccctctcgacggacggtactggtgccggtgatgccttcgtcgatgaacacgcctgcatagtcccaaccaggggtggattgaatcagatgagagtagtacgacacctgggcggcaatcgaagatagctggcgttcgtgctcggtcgatacccgcgcataccctgctactcgtagccgacgtggcgtggcggggctaggggggataactcgaaaactacgcgaggtcactccctgcttctctttcttctatggcgacaggtgttttggttgtatccatctacgctctaaacctgagtcttatccagtcgaacctgcagcaacaatgcccccactggcgcggttgcttcatgcccgatccgcgtaaggatcacgtggctttcgtttggggtgagtgcgccggtttcggtgagccgatcaataaaggcgacctggcgggcaagatcgacttcggcattgaacatggcacccgtcacggtctgccacctcgggtgctgaagcggtgcctgatatagcaggcatgcgagcaatacttacggtgcttgtttccgtaggcctcgaagctctcaccgcaagcaacgcaggtgaaggtgtatattgcccgccggttgagccgttcggggtgggcgtgctaccacgacaaacgacacacatccgaacagaacctttgccccgccaccgcagcttcaaaatgcccattacagtgttcgcatgccttagcaggctcaacatcaaccgccggatcgatgttgatgtcagctctgcgacagatcgacttcaccgtattgcgcgacatgcccaatctggtggcgatctgcccatacgatgcgcctcggcatcgcagctccacaactcgctcacgggtaatctcacgtgccatgacgcgctcctgctcaatagaaataaggtctctactgacagggcttcgacccaccccgatttataaccaccactgtcctggtgcgatgggaacaaaaatggccccgccaccacctcatgtagtgaggcagcgacggggcgaaacaggacagttttcatgagtcttggtttagtggcggagtttttcgttgacccggcgctggacggcgtcgtagttggatccgagtctgcgtcggcgttcgttgccgttgccgtattcgccgcggatgaccgcgtcagcgagcgcgtcaatgttcggtgccggcttcggtgtgggtgcgggtttcggtgccggcgcgggtgcgggcgtgttgccggtcatgtggtcgtaccagtactgggcgcgagccatataggcggcgtgctgagtaccggccagcgatgctgggcattcggtggctgagaagtttttgtgcccgaacacgttcttaccccaggtagggcggccgagcttgtaataccgacagatcgcggccaccaaatgtgcgccgttgtcgaggcaggcgtcagagattttccatgggttagaagaggcgtcggcgtgctcgataccaatgctggtggtattggctgcccagtttccggcgtgccaggcggtgtcgcggtcccacacgagctgcccgatccgcccggaggtttctacctggtagtgggcggaggcgggccgggtctgccacac

SEQ ID NO: 96 - DNA, 6363 bp, Propionibacterium acnes; identical to SEQ ID NO: 95
  source 1..6363: mol_type = genomic DNA

SEQ ID NO: 97 - DNA, 6363 bp, Propionibacterium acnes
  source 1..6363: mol_type = genomic DNA
gtgttgtggactctcggggtcagtctgtccgctcacttgagatggcttaacatttctgaccgacgccgaagtctacgaacgctgcgaaacgccaaccgacgcctttgcaaccaagccttcttcatcaagatctacatcgacgaagacgaccaactccgcgtcgagaacaaccgacctttcgaaatgctcctcgaccctcagatcaacgccaacgccctcacctgtgcccagaacggcaacaaggcccgaatcgaaactaaggggttcgagccttgtgcgtggggttacttagacgttcattttgatacaaggatctgggtgggtgcacggaggggctaggtgggtgcattgcatcctgacaggagcgccgggtgagttctggttgactaccggcagcgtgttcggtatgctagaggatagttacgcgacagcgtccgttccaatttctgggagtgtgttaattccgatggtgctgtgatctccgttcggctacgccgagaagcgtccaaatgtttcgacggttttggggatcaatatgtctgctatcgaggtaatcaatctttctttttcattttccgctcagccactcttggataacgtttcattcagcgttggcgatagcgagcgcgcagtacttgtggggcctaatggctctggcaaaaccactctcctgcgcctgatacgaggagagctaaccccggatcgaggacatatcgccatcagtgatgcaggagatgcaggttcttgtcgcttcccttatgttcgtgacgccactggcacagttcaggactatctggacgacgtgttggctggcccatgggagttgctcactcgcttcgaccacgtgacgaagcaactatcggctgcccaaagttcagcgagtctcgctaaagagtacgatcacatactcaccagtcttactctggccgacgtatggtcgctcgaagctcgaatcgatgaagtgttagccggtttaggtctaggccagctgaccggacgcggtcgacagcgcgcactcggctcactctcccctggccaggcagtgcggctcgaactggcaggcatcattatggtcagaccagtaactctggtcttggatgaacccaccaatcatcttgatgacgaagccgtaggctttctgatccagcaaataacagattggccggggccagtgctcatggccagtcataatcgtgcgtttattgaagagacagccacggtcatctatgacctcgatattgccccgtggcaggctttggccacagctgaaggagaggctgtgtctggcgtgtaccggtgcactggcgcctatagtgattatcttggcgccaaacaacacgcccgcatggagcatcaaaagcttcacgccacccagcaatctgaaaaacgcgcgattcgaagtcatcgccgtcgtagcgaagatatcgctcgtggtggagtgaaattagcgaaggcgcagggcatggcacgtaagttcttctctgaccgggcagaaaagaccgcgctgcgacgcacgcgtaacgacgatcaacgcttacacgatcttgctgaacatgaggtgcgaaaaccccgcaactaccaacttaagctcaaccttccaccagtcggctcgcgtggcgggttagccgtcacggcacgaagcgccttcattccaggcaggcttctcccaatcacgttcgaccttgccacgggggaacatttaatactgactggcccgaatggagcggggaaaaccacgctcttgaattggcttgctagtgggaaaacaacaatcgaccctagatccgaagccagcggcactatctctgtcagcgggcggcttgcttacgtcccacagcgcctaccacgcacaggagattcctactttcacccagaacattggaaagacgggatcagagaacttggcacgggaatactccacccatccatgtgggccaccccagtcggccaactttcagatggaaaccagcgtcgagcccagatcgcgttagccgtggcgcagaaacccgagattcttgtcattgacgaaccaaccaactacctcgacctcgccacgcttgaagaactagaggacgcgctacgccaatggaacggcacactcatcatcgccagtcacgaccgctggcttatcaaccactggcagggaacacaaatcgaattatgccccacagatccagcgcccggatcaccgaatcccctcttactcgttaagagccggttcgagccgtggtagtgccgtccttgagtgtgagtttgatagcgccgtcgtggttgacggtggtgtgatcgacgagggtgttccaggcttggtcggagtattcgagtggtggttgggtggcaaggtagtcgcgtacttcgattgcttgtgctcggcggtggcgcagatcgtcgatctggtcgctgatccgttgatgctcggcctcaagttggtggtgccgatcttcaagctcgtggtaacggcggtcgtagtcgtcagggtcgtgggcggtcgtggctgcggggtgatgagttggttcatcagcgtgatggtttcttcgatccgctcccccagcgtggcctgcttggtttcgagctcgcgggtgtcgtagacggtttcgtcgagcaggcgcatggtgtcatcgagcacgtcgttgccggtgacccgcttagccagggctgcgacgaaggcgtctttgatctggtcttcggtgacgtggggtgtcgcgcagtgatgatccttgttgtatttgttgttgcagcgccagatgtagcggcggtatttgctggtggagtgccagactttccgcccaaacctcccgccgcaatcggagcaggtgatcgtgttggcgaaggggtgggtgttggaggtgcctttgcctgcgcggcgggcgagttctgcttggacggtgtcccaggtgacgggatcaatgatgggttcgtggttgctggtgacgtagtactggggtacttcgccttcgttgattttcatggtttggttaggaagtcggtggtgaagctcttttgcagcagcgcgtcgcctttgtatttctcgttggcaaggatcgaccgcacagtggagggcgaccagatttgtttgccacgcggggtggggatgccatcggatgtgaattctttggcgatggtttgtggggttgcgccttcgaggaagcgggcataaatacgacggacggttggtgcttgggtttcgtcgatggcgaggttgccgtcttcgcctttcttgtagccgagcagggacgcgtaggacaccatgattttcccgtcggcgaagcgtttacggtggtcccaggtgacattctcggaaatggagcgggattcttcttgggtgaggctggacatgatggtgatgagtagttcgcctttggaatcgagtgtccagatgttttctttttcgaagtagacctctacgcctttgtctttgagctggcggacgtggatgagggtgtcgacggtgttgcgggcgaaccgggacacgctcttggtgaggatcaaatcgatttttccggcgagggtgtcggcgatcatggttttgaagccttcacggtgtttggtgctggtgccagtgatgccttcgtcggcgtacatgcctgcgaattcccactctgtgcgggattggatgtggctcgtgtagtagtcgatttgtgcctcgtaggaggaggcttgttcttccatctcggtggatacccgcgcgtaggccgctaccctgcgccgacgccgagtaccctgcaccgtggtgtgtccgggtatttttgtggctgggatcgcggtgacacgcttgttccgaatctgcttggtggtcatatcgcactttcctcgtccaggctcaccgccactggcacttcgccgctaatggtgtggatggtgagcgtacgatcgggattgacaacgattttcacgaggcgcgtcagcgcatactcgtcgtcccagtcgtcgaggccaagcacgcgggtgcagatctgggtgagatgggtttctcggatttgtggtgcctggcagggattgcctttacctttggtggcggtttcgcaccaccaaaacttgtaggacgtgtggcggcgtgtcttggtgcggcggtgataaaacctgctacagacagagcattcaatccgagaggtgagcccggtcgttctagctgacggcgtggctccacgtccgagatgtctgcgccgggcgagctcggcctggacggcgccgaacgtggtctggtcgatgatgggcgggtgggattcgtcgacgaggtagcgtggcagctcgccggtgttggtatggcagttcaattctgcaacgtttggccggtaatacttttgcaggattacgcggccggtgtagatttcattttcgagccatttgcggatcgtcttaccgcgaaacttggctccccgcctaggcttgaccccttcagcattcaactgactgatgatcttggcttcagtctcgatgatagccaagtcactacccacgtattggtagccgtagggttggcgcgaatgcatgagcccgtcggcgtatttcttccttatcccccatttaacattcttcgacatggatcgagattcctcctgcgcaaacgatgccagcagggtcagcaggagttcaccgtcagcggtcgcggtatcgatctgttcacgctcgaaacgcactgagacgccgaggattttgagttcgcggacggcatcgagcaggtcgacggtgttgcgagtcagcctggatatcgacatcgtcaaaatcatgtcgatgtcgccggagcgggcggcggccatcatggtctggaacccctctcgacggacggtactggtgccggtgatgccttcgtcgatgaacacgcctgcatagtcccaaccaggggtggattgaatcagatgagagtagtacgacacctgggcggcaatcgaagatagctggcgttcgtgctcggtcgatacccgcgcataccctgctactcgtagccgacgtggcgtggcgggtctaggtgggataactcgaaaactacgcgaggtcactccctgcttctctttcttctatggcgacaggtgttttggttgtatccatctacgctctaaacctgagtcttatccagtcgaacctgcagcaacaatgcccccactggcgcggttgcttcatgcccgatccgcgtaaggatcacgtggctttcgtttggggtgagtgcgccggtttcggtgagccgatcaataaaggcgacctggcgggcaagatcgacttcggcattgaacatggcacccgtcacggtctgccacctcgggtgctgaagcggtgcctgatatagcaggcatgcgagcaatacttacggtgcttgtttccgtaggcctcgaagctctcaccgcaagcaacgcaggtgaaggtgtatattgcccgccggttgagccgttcggggtgggcgtgctaccacgacaaacgacacacatccgaacagaacctttgccccgccaccgcagcttcaaaatgcccattacagtgttcgcatgccttagcaggctcaacatcaaccgccggatcgatgttgatgtcagctctgcgacagatcgacttcaccgtattgcgcgacatgcccaatctggtggcgatctgcccatacgatgcgcctcggcatcgcagctccacaactcgctcacgggtaatctcacgtgccatgacgcgctcctgctcaatagaaataaggtctctactgacagggcttcgacccaccccgatttataaccaccactgtcctggtgcgatgggaacaaaaatggccccgccaccacctcatgtagtgaggcagcgacggggcgaaacaggacagttttcatgagtcttggtttagtggcggagtttttcgttgacccggcgctggacggcgtcgtagttggatccgagtctgcgtcggcgttcgttgccgttgccgtattcgccgcggatgaccgcgtcagcgagcgcgtcaatgttcggtgccggcttcggtgtgggtgcgggtttcggtgccggcgcgggtgcgggcgtgttgccggtcatgtggtcgtaccagtactgggcgcgagccatataggcggcgtgctgagtaccggccagcgatgctgggcattcggtggctgagaagtttttgtgcccgaacacgttcttaccccaggtagggcggccgagcttgtaataccgacagatcgcggccaccaaatgtgcgccgttgtcgaggcaggcgtcagagattttccatgggttagaagaggcgtcggcgtgctcgataccaatgctggtggtattggctgcccagtttccggcgtgccaggcggtgtcgcggtcccacacgagctgcccgatccgcccggaggtttctacctggtagtgggcggaggcgggccgggtctgccacac

SEQ ID NO: 98 - DNA, 20723 bp, Propionibacterium acnes
  source 1..20723: mol_type = genomic DNA
gtgttccagtgcctcgcgggcgtgatgttcttcttcggcaccttcttgccacatgcttcgcgcttcagcctcgccatccaagcgaacctggactgtgaacgagtcctcatcgggtccgtcctcattccacgcggcaatgatcccacgggcctcgtctgcgacctgactcaacttcatcgcctgcccgacagccccgagagccggaatctcgaacacccagatattcgcctcagccgagacctcacgatgggcgatcacttcgtaggtcgtctcaccttctactgtcgtgtccattacttccactccttcggaattttcacgcctgctcgctccagctgtgccaggacaccaactgacgtcagctggtgtcctgctggtatcgatacgcgcccggctccgccggggcgtccccagatttcatggcttcccttggcgttccgcagacgggcccatccttgagaacggagcagcttgaggacgtccttagttttctgcggtttcacacatcatagtatagccccacttaacttgtaaactaagcccctgtttacattttagttggtgcatgtgatccctgctcttatgacgtcgcccgacctggcgccttagacatgcactgttcatcctcaaccacactcaccgtcacgggtccgaaggcgaggtctatcaccattcgcatcgatgaagttgaagcaggatcgtccgcatcacgcactgccgatccggacagacgccaccggccgtaccgactgtttacgatctgccaccgcagactgctgccataaccgctatcacctctgatagtacttttagtactatcagaggtgattcaagattctcctgtcgagcagccctacagtcacgaagtcctgcgatcgtcatcgcttaaggcagacggatggccatcggggaccactcgcaaagcaggggcgatcagcaacagtgatgtgccatgagcaagtactggtgcaccggctgtttactccgcccctagataaaccacgggtgcaggggtggacaccacaccatgaccgatgtggtgcccaccccatggctcacaggcaggccctatcgccgggagcactgctgcagatgaggctcagtaacctgccatgtctcacctggggccaaggtgccaagctccccacggaatctcaggcatcggaaaccagcagccgaacttccacagcatgagcgccctacgaaaaagcaggccgccgacggttctcaagaactcgccggcggcctgcatcgccactcgaactgtaaccgtggtccgaccccgtgcacaggtaagctccacactcccaccaggcatggccgaggcagtaccaagttgccgtggcccatcggcagatttggttaaattttgaaaagtcatatagactccttctgtaaatttttaaatctcataggactctcgccatcgccagccagcttcgacaggagtcccgatgtttcaccgagtgaaatatcggcaccgtttgagttgacctaaagctcaaaagatgctagaatccatcttacctcgttaggggcgttttgtcaaacgcccctatattgcgtgtcttcgcgcgtcgtagcgctgatgctgcgcctgtgtcgactatccgtttgtaagtactttcgatgacaccagcagtggctactcatgactggtgcgtgcgggtctaaagcagcagggaaaggaatcgcagtagaagccgcttgattcctatcacccctgatggtactatcagtactaacagagcagggcttactcgatgcgtgagaatcggggacatgctgagcctctcgtaggtcattggcctgctgggcgtcagtgtggcgcggttcgatccagtgaactctatcagctctgttagtactgtcagagttgatatattcgaccccaggaggagcccatgagttacatcgttcgcaccggaaatttggtcgacacccccgagctgcgtgagggagagcatggccgtacacctacgctcgcgtcatcgtgtccgatcgcattcgccaggaggacggcagctacgtcaacgggccagcgatcgcctacgacgtcttggcgggtggcagccaagccgtgaatctggttgaagccgccaaggcgagcggcaacatccgcatcatgttcgcgggccgttaccgcgtcaccgagtggcggggtgagcagggcactcgtatccagcatgaggtccgagccgacgaggtgagcgtgagcctgctcggtcagagggtgaccgtggagcggcctcgaggtgacgtggcatccaaggagagcacgtcgttctgattgagtccgggggcacggtggtcgccgtggtaaaccgtgcccctgacagtactattgacactattggaggtatcagtgtgactgctcaaattttcgccttgtgcaaccagaagggtggcgtcggaaagtcgacatcgacgtttcatctggcccgtgccgcggtgttgcgtggccagcgtgtgcttgtcgtcgacaacgacccccagggcaacctgacgtctgtcgcggccgccgagcccgtgggggaggatcaggcggggctggccgatgtgctcagcgcgcgtgctccagagaccctccgcgatgtgatcgtgccgggaatctggtctggcctcgatgtcgtgccgacgtctggcatcacgctcggctgggtgcgtgacgaactcgtgatcgccggtgccggccgagaaggccggctgcgggaggccctggccggcgtcgaggacgactacgacgtgatcctgatcgactgtgctccatcgctcgatcagctcacgatcaacggcctggtggccgcccagggtgtcatcgtcgtgacgcactcgaagttgtggagcgccaacggcctcgcccagctgctcgacaccatcgacagcgtgcgcagctactacaacggcgcgctgcgcgtggcgggcatcatcgtcaaccagcacgaggagaacaccatcagcgggaaaacctggctcgacgagctgcatcaggctgccgagtcccggaagctgaccgtgcttgacccgccgatccccaagcgtgtcgtcatcgccgataccgtcgaggccgcgcgcggtctcgacgagtggggaagtgccgaggcggccgcgctcggccagttgtacgcccaccacctgacctgcatcgaaggagccctgtgatgacccgtccagccccccgaaagtcctcattgagcggatcaactccggtcgccccgccggctcagacggcgccggcaccgtctgccgcacctaccccccacaaggccgatgagtcacagacgagcagcaccacgaggaagtggcggcacaaggtgtcgttctaccaggacccggccgacaccgaccgggtgcgcggggcgatcctttacacgatgacgaccgagggcaaccggaacctgagccagttcgtcaacgatgccgtcatggccaaggtggtcgagctggaagtcaagtacaacgatggccagccattccccgctgtgggagcccgaggactaccccagggcggtgcagccgccgccggtgagtagaggaccatcgaccgtcgggggcttcaccatgcccccgaccctcggtcatcctgatcctcttgtcgatggtggtgacagtgggggattcacgcctcgttcagatcagaggaagtctcaccgcgtgattagtactatcaaatctgacagtactaacagagcagatagggttccctaggtcgagctgtatcacgccgacaaccagtgagccagtgatctacggggggcgcaatatgcacccgatcggtagccgcgaaggcctcgccctgccccgatagtactatcaccactatcaatggtgctagtggtgagtttcttccattgatgacaacagcacagtgctgccgtctgtgtgcgggccaccagcccgcacacagttgccgtcgaggacgttgttcatgctctgtggtggccggtcctgagggcggctcgcaggatctcccggcgctcacggcgacgagcctggtagccaaggtctgcatgttcggcggcgagacgggctttgagggttgcggcttctgcacggcggtggagttggtcgtcgatgagttgggcgcgggccagacgccgcttatgggggttgtcgtgggtgaggggggcgtcgaggctgccgtcgtgggttagggccagggctgctcgttcggcgtcgtcgaggccgatgtggtggacggtcacgggtgcggtggtgacgtcgaggatgtccaggtggatgttgtggccgccgccgggggcttcggggaagtctggtgggctggcctggccggtgtcggggtcataccaggacaggccgatgatctcggcccagggtgggggcgggcagacggctcgcagaagggtgtgggccaggaacgtgttgcgggccatgatgcctccaagggtgaaaagcagtcgagtagcgatgacggcggggtagccgtctgctgggctgaggccgaccgggcccatgtcctcgatgctcttgtgctgcggccataccccaaagctaccaaacagtctttttaatctcaaagatacaaacagtgcttgacatattatctgcagcgaaagatactttcatcatggtggctgatcatgattacgcgactcctgacgatgagtggatgacacctcctcaggtggcccgtgtgattccgaacaccactgctcaggctgtccggcgctgggctgaggagggtcagcttcctggggcgtttcgtactccttctgggcgttggcatattccgtggtcggctgtggtgggcatcatggggtttgatccgcgtgagtccgcatcaccgagtgatcgtcaccagagctgacagagtcgtcgatgagctttcgagtgcagagctgatggcacgacggtctggatacttgtggagatgagagacgactacatccagtcatggtcggggtacaccgaggggcagattcagcagtgctggcacgatgaggttgcccctgccattgactcgctcatggagcaggtaaggtctgttgccgagactcctgtgccgccgggttcgagattttacggcgatgagcagtgggccaagccttttcatccgtctactgcgatctgcggttcaatgggtccgccagcgatcacttgcacgcgctgaagctcctcgtctgggaagcgaacgtccaccatgtctatgcgccgtacacccttgctcgtgcatctattgaggcatcgtctactgctgtgtggctgttgagcacgaagacgcgcggagaacgtgtgctgcgagccttgcgatggtacgcgcaggattgtcacgactcgtgcaggttcatggatgatgagcagtatcgtgaccacctattgcggcgcattgaggggactgtcgctgcgggaaatctcgactcgcgcgctgctaggaaacggtaccgtgcaaccgatgttgtcgatgaggctgatcagctggttcccggaactctgagggcgtggcgagctttttctggtatggcccattcccgtatgtgggcatccagggggctgctcgacatggaagtgctgtccagtggccaaggaatggttacggcgaaggtgacgagcggatcggcccaaatcctttgggccgtcgtggcagctctgaatgttgctctcagtgccgctcgcttgtggcgtgattcgatgtgctcaccgtttgctgttgcccagtcggtagacgcgatgccagaggcgtttcgccgccctgtttagggtctgatcggggtagtgggtgttcacggggtcccaggttggccatggggcggcttggtgatgtgagttgggttgtgtggcagcctgggtgttgggtgtggcttcgttggccacgaaggcatgctcttccttgtgctgggacttgagtccccagtgctctcccctttgctagtggggggtggggtccccggaggtaggtcctccggggactttttctatgtctgtccgtgccccaggatttcgtatctaggcagtaccaattttgggttagttggaggtttctttggtaatggacagggtgagggtgatgaagaggtggccgtccttggtggcagaaattttctcgaacttcagctgaatgttgttatcagccactatctgttgggcggtgaggtgctcggagagcttctggaatccttcgcggatccacaggttgtaggggttggtgaccgagaccgaagggtatgggtcgaccttcagcgtcaggactggctggtctgggttgagggagttgatcttcaccagtttggggtaccggtcgcactcatgtgtctcttgtgttgggggccagcagtcgggggcccattcctcccagtggtcacgcatctcacgaagtactttcctgcatctcagcctctgcaggagctcgcgcgccaccgatgggagggctgccatgatgagggcaaggactgcgaacccgatgatgtaattgaccgtgtccctcgtcacgccgttcttgccgaggattccgatggcgaacgcgatgacgacaccgcccaggcacaggtgcatggggtcatgctgtgatggtttttcttcttcagcgactggtggggctatagtcatgtgtgccccttagtactaagtgatactggtgggttgcttttccccggtggccgtgtgcaagacggccaccggggttttccttcatgttcctgattttatctgcccggtgtggcgttttcatctttgtgtgggtggttcgcctggggtcttggagtgtggtgacgcggtgatggtcacggtgacggtgactgtggcgcgtggcgggtgaggtggttctttcctggtctggtgtgtggcccaggtgagtgtggtgatgagggccagggtgaggatgatgaccagggtggggagtagtttgtctggccggtgtcgccgggcttggtggcgcggcatgtttttccagggtgtgtctccgaacaggtcgtcgtcggaggggtcgtcgtggttcatagggtggccttggcgatggtggtgggcgagtttggtccaggtgatggtgccgtcggaggcgatgtggcggtcggcgggcagggtgtggacggtccatccggcgtcggtgagggcggtggtgaaggatttcttgatggatcgtttgggtaggtcgatgggggcgtgggtgccgacccagatgcaccggtttttgaggtgggtggcgccgaggtggttcatgtcgcggaccatgttttgggtgagtgtgagggtgtcggggtcccattggacggggatgatgatgtggtctgcgatggtgatggcgtgttgccaggcggcgtcgaggtcgttgtttccggtgtcgaggatgatgacgtggaagcggcttcttagggcggtgatgatgcggtcgaggtcgtcggcggtggggggtgtgatgaggctgttgtggttgtcggtgatggtgggtaggcatgtgatggtggcccagccttctggttgccaggagatgtaggggtcgaggtcgcggggttgggaggcgaatcctgggtgacgggctgcgcgggcgaggtcgatgacggtgttgtcggtgtggcggggtgcgcgggtggagagggtgccgcgtgggttgatttccacgacgacgatgtcgtcgtgtcctgctgtggtggcgagggcttgggcaaggatgacggccagcggggttttgccggtgccgcctttgaggttggcgagggtgatgatgtggtcggtgagttgggcgggtgcggcggtgtggtgagggttggcggtgaggttggcgatggtgaacagggcatcgagatcgtcggtggtgttctgctcggtgggttgggggtcgccggagatgatcgggtcggcgcggcgcggctgccatgccggcctcaccactgtcacgaccaccacgggtctgctggcgctgtgtgggtgtcgtcggcgatgactcacgatcggcagtctcaccatcgtctcggtgatgctcggctagcgctggacccggtcaagttcgggccggctcacccagtggtgatgactcggtcacagaaccgctgccggtcgttatctcggacgtctcgactcctccagtcctgatgggcgttggagccacctacacctactctcagaacgaccccgacctcgtgtggggcgggggcagatgtcacttgggccaatcgagagcccaggtgatggggaaagcaggggtgtgatatctgtcctggaaaactgggcagctgctaccgtggattgacggatctccacgaaagaagggaatgcgaccatgcagatcaccgtcaagaccatcaaagatcatcgggttcgcactgtccagaccgccatgagcagcgccttggggattggttcccaggtagacatgctcgcccccggcggttccaccagctcgagttccggttcatgctgctcgtgctcgacctgcgcggtagtggcgcagcctcaagactgaacggctggtcagccccaggggcgtggcgctcatcgcgtcacgccccttctattcgctggacagggtgcgcgagctgaggaacatcgcggtgtgtgcgatgacgaggggcaggagcaagtctgtgcgggttgccaagtagccctgcgcgatggccatcacgctggccccgacggcggcgaagacacctccgatacgtcgcttcatgccgccgaattgcatcaggacgaataggactcccgcggtccacatccctccgggcatgcatctgggaaagatgaaccggaagatgatctcttcacaggagagctggagtactagcagcgtagcccccacggggagactcacctctactgacagacggatcgtcttcatccacccacccgagctggcatcgaccatttcggtggccatgcgcgaccggtggcctcgtgcctctcgctgcgtgtcgatccagccgagcagtccgtggacgctctccgctaggactcctgacgcgacagtctcaccaattcctaagcccacggcgaggaccgcgacgcccccctgcacggcaggctgtgtgacttggtggtcccaccaacccgccggcaggaccatgcgtgcgaggctgcacacgagcaggaggtggagggtcacgacgagcgacatctggaataccgcttgccgttcggcgatggtggcgttgggaaagagcggtaggccggcacgggcagcggcgctcgacagcttccgcaagagcggtttggagacgaagtagtaggcgacgtacagcgccagcgctgtcgcgatgatgatcatcggtctgccaccgagctgacccgccgatagccgtttctgttccaccaatactggctgttgtagatcaggtggcccagaacacaggcccagatcccccagaagatgaacaggatagtccccaaggcggcgagcgggatcttggagaggacctgtccccgtccgaacaccgagtggccgcaagcaaacaagagtgctcccacagcggtgagcgcgagccaggccggggttgctcgcagactgatcaccgggaccccgacccggaagccgacctcttctcctacagcgatgactagcaactgccacagcggcatgttctgaacggagcgcgcgactcgggctcgagtcacccacacgggctgttgagcgctcacatcaccactcaggtaccccggtgaggcacttcgcttagtactggggcccgatgtgcgagcattcgtgatgtgtcgcaggatccggttgtcaagccaagaggccagcagggctccggcgacagtgacgggtagcccgatcagcacgaggccccagccatgcggtgccgagaggtttctggccggcgtgcacgcgaggcaggcaagtgccaacactgccagcactacgacgtagatggtcgcataattcgacttgcgggtgacgttgccgaccatcttggccaaagtcgctggggaccagctgatgagtgcgatggtggtcagcaggaagcaggaccagacagacatccggcgcactcaggggtatgggtgcggctgtgggttttggaaaccgccatatgcggcgtagcgggggtgtgcccgcatgggtgcgctgggcagtgacagggcgagcagcccaggcgcccagagcctgacacagtgcagtcccagcccctggatctctatggtggtgaaatcttcgatgtacaggggtgacacacaggtgatgctgttgaccacgctctttaccagttccgcccccgtgtgggtgtcgtcaggtggcaggtcttcggcttgggcaatggtgcccgcgtcgaatttcgccacaactgattgcgcggcctgatagttcctcgcgtagtaggagacgttcgagtcgaggtcaagcatgtcctccgtggacatactggacgcgtcggcctcggcgtcgaaagacgtccataccgcgagcatccgaaccccgctgcactcgagaaacgccttgtacatggctgcttccagacccgcgtctgcacctaggccgacggcgacgaggggaagttggttgccactaccgaccatcatgcatgccacggtgaaatgcttgagcccgggagtcggaagccagtagaaacgcagttcgtggcttcggcccgctgcacgttccacgagccgctggatgcgctggaggcggggtccttcgacgcggatgcgcacaggtgacgaggctccataccacaggcccatcgcggcatctacctggatcaattcataagccgcggacagcgttgcggcgacgcgtgaagtgtggacggcggtgccggtcgtcacggccgttcccagccacggctcaccgtcgtgccgacgggggttgtaacccaggtaaaagaactgcgccgggatccactcctgccgggaggtcccgacacggggagtcttgacccatgtcatgggcaagtcgtcgcgataggtgtcgaacgcacctccagccactcgttgcgcgaagccgaatgcgcccagatcgagaacttcgtcctcggtccgggcgaggagttcctgacgagtcgcccagcgccgttcgaagggactatggagaatcccggtacccgcgcagtagcgctcgacggcctccgcgtagaccttgatctctgcctcaaactcgttcagccccaccccaccgatgtggtagctacccggcttggggtcgggccggtcaagcagtgcgtgcatccccgtgagttccccaccgttcacccgcacgcgggggccgagcgcggggtgcagcgagtagccgacggaagtcaccagcccgcatagcgggctgtaggtgcgccgcctgagccgggctgcggtctcgacggggtcgctatcctggcgaagcttcatcgctcgccccctgccgccagccactcacggatgtcgtagtacaggtccggagcggtttcaacctgcgctggtgcatcaaaacgggacataggtaggacgtcgttgtaggcgatctccatcgtcggtatgtagaccgacaacactttgttgcgcgtcgtgttgaggccgttgcgggcgatgctgacagcctcatgcgcgacgtgcgcggccaagatcgcgcgcaccgacgctgccacggccggcgctccggcccttacgcggtcggcagcggccacccgcatccaggacaggtagctctgccgttcgcgcaggttcatcgcgacccgctgctcgaaggtccggtaggacgaggtcgcaccagggacgacgtagggacccacgtacaaggccggcccgtctacagctgcgtggagccacgacaggtgggcgcgtcgggcgaacaggtcaagggcgcgcagcatagccgggttgttctgcgccagcgctaccacaaggagtggctgcaggtccggcgccgaacccagcaacgccaacatctgggaggcctcctgctccatgtgcaactcgtcggccgactgctcaagccgcaggcctgcgaagagggtggctgatggctgcgtgtcgtcagcgaggacggtagcctgcagcccctctccctcgagaatctgctggatatcgccggcgaggagcgcgtcgtcgctgaatacccacaccgggcgcgtctctctacctccatccatcttgtcctcaacgttttcgaccagcgcaccgatcgatgctaggtgggccatcacgtcgtcaagggccgcgcgggtcaatccgggcacccgggacacgatctcgggcggctgcagtccttggctcaacaagtccaaggccggccacagggtcccggtggcgtcgtcgtcctccagcgttgtgctctcggcgttccagacgcctcgacggaactccaccctgtccatcgagtaaggcaccatcatgaggcccggtgaaatgtggttggtcagtttggctcctgtacagcctaggcttggacgcccacggtcatggtgtgggtcgcggtttggaaaatcccgtcgaggttgagtgcctgattgagttcgtcctcgtagaagcttgaggactcgactgaggcaagaccgagccccgtgcagaccaagttgatctgttgtgcgatcgccccgacttcttgaagggcgaacctcaaacccctggctccgtacttccgcatcgccctccacggcgagatgacgaacaccaagtgcactccggccgcatccgattgctccacggccggctcgccggccatcgaattcctcacgccgcgacagccctcttcaccggtcacgggcaccagtcgatcgatgaccggcgagtagcggtagacgccgcgactcaagccggacacccgttgtgcggacatgaagatagacacgggatacagccctccaccagacgggacagcgcgtacattataccgcacgatatcaccgctcgaacgtgggacatccacgtgccccgtcacaccggcagcacctctcagaaacgcagctacgtcacgcaggtctagggattcgccggtgtagttccgtccgctgcgccggcgggcgatcacttgctcgaggggtgcgcgcaccctgctggacctgggaagttcgatcacatcggcagcgaacgtgtcgcgatccatctgtccgtacgtaacgatcatggggtcaacgaaatagtcgccgaccgagacgttgaactccatatccccccgggcgatgcgcgaggcgagcaagaagtctgcagctgcgttagacagccccggcccatcagtgttgtcgcagcggaactcgtgggtccgaaaccccacaccttccgtgcccgggctctgcgctcgatacgacgtgatcgcagaactagccttccttaaaccgcccggagtagctaccatgaccgtcccctctgaggtctcccgaacacttgcgacaatagcagcatgtgggggcagccgccagaggcgggcatccttgtctcgacaaccattgacctccggattcgatatgtgcataatcatagtcgtgccaacacgaaacgtgtacgtctcggaagacgacctagacctgttcgccgaagccaccgagatcgctggaggcctgtccgcagcggtgttggaggccttgcgcagctacgtagacaggcaccatcgcgcggccggcggattcgacgagatcgagctggagctgcagaacgacggtatcgaccaccgtgtcaccttcatgggtcgccgcctgatacacatccgccgtccagatcccgagggaacccgcatagacactgtctacttgaccgccaaacaccaattcgccgttgccaccaaaatccaacgacggctgccagactggacgaccggccacgagcacatctggtccgacccggagacctggaatcgggagttctggatcgcaggtgacaagacgatggccgtgtatcccagccttgacaaactccgcgaagctgaccccaatgtggccgaacgcgccgaggccgcggtcaaaatcccgccgttcgaggtcctggacatctgatgacagaatcatcatcttcccggcggcaattggcaatgccggtgctgtcagtcacggatctagccaagaaatacgtggttcatggcggctacgaggtcccggcactcaacggtgtctcgtttgacctgcacccgggagagatgctgggtttgttcgggccaaacggtgctggaaagacgacgctggtcaggatcatcgcgggcctcttatcggcagattctggagacgtccactggggatcggatcaaggtcgggccaggttaggctacgtgtcccaaaagggtggactgcagtacgggctcacgtgccgggaagagatggtcttccacgcacaatgcttcggccagtccgccaagcaggcccggactagcgtcgacgaggtcgccgcgatgctgcactgcgattacctgatggagtgggacgtcggaaggctctccggtgggcaacgccgaatcatcgaggtagggctagcactcgtcaatcaaccatcggtcgtcctgctcgacgagcccaccctgggcctggaccccgcaacacgcctgtcgttgtggcaaacggtaaagtcggcacgccgtgagaccggtgctgccttcctcgtcaccacccactacattgacgaggtggccgagcacctgtccaacgtcagcgtgatcaaccacggaaccgtcgtcgccaacggctcgccagcgcacatccgagaaatgttcgcgaccggggaagtaacgctcggcgtggccgaggatacggtggacagtgcggtggacgtgttggctgggaccgcgttcgaggcgcaccccaccgaaaccgtcccggggatcgtggtcaggtccaggcatcccgacgtggacgcggccaagatcatcaccatcctggctggtcatggcatctcggtggactccatatccgtacgcgaggcgaccttggaagaggcgtttctcacgatcacaggcagtcgagacccggagaggcaaatcccatgaacacttgcttcaggcgatatgcggcgatgtcgctgagagcgcggcgtgatttggccctgacattcatccagcccctcgtctacctagccctcttcggaccgctcttcgtcacgacgatgaagatgtcgcagagagctaccgccgctacgggttactccctatacatcacgggcctgtccatccaaatggccatgacgatcggtgccttcgcggggctaaccatcatcctcgaataccgactcggcatcctcgaacggatctggagcacccccctcacggggagcaagatgatggcggggcgaatcgcgcgcgacgtcgttatgatgatgatgccgatactggtcgtcttcatcatcggcctggtgctgggaacacgccccagcccactgggcctggcgacctacttcgtgacagtgctcggcacaggagccacgttcgccggggtctcctacgcggtggcactcagaacgaagagcgaggcagcgctatccgcgatcttcaacctcatcctgctacccgtcctcctgctgtcggggatcatgctgcccatgtcgttcgcaccacactggatcgccaccgctgcccacgtgaacccgttgtggtacctggtgcaaggcgcgcggaaccagttcagcgttctagggctcgtggcggcggccccatggagttgggctgtggccatcgtcatgtcagccgctgccttcggctgggcaagccacgaattcaacaagaggcgctgacacaaagaatggtgccgggaacccaggtccccggcaccaccgagtgcactcgcgacgtcaacgcaccgttgcggtcactgcgcaggtcgagcacgaggacgacgagcccgcgctgctgcaggtcgagccgccaggcgcgagcaggtcgacgttagcgtcggcgccgccgaagacggacgtgacggccggctgagaggtgcggatgcggtgctccagcgaggaggtggtggtgagtttcatgggaggtgctcctaggagtgagacgagaacaaaccctagcgataggttagcagtccgcaaccgactccgggaatagtagaagcgcgcatccgtagcggaagaccttagcctgattacagtgaccctgttcgcgtctcaacattattccacacccccgagcagcgaacgacaccgcgatgatgatccgtcgcctctccaccgaagaactccgcgcccacatcgcaccgggccgccgtcccgtgcatcagacctgccgtcaacgtcggccatgaagctgggaaggtggctctcgtctaggagcagacgcgggacgcctcctccaggttgggccggggaagtgtccggttcttgatgtaggtggcggtccctattgatgggcgttgaccgtgggaatgcggtcggcgaagggggtggcgaacccgttgagcgcaggcttccagcgcatgcatcaacgctgtctgccggccaccggcaagcctcacccgcccgtcatggccatcatcgaggtgccggtgaatcctcgacacatgatcccaactcccccggaggggcttccggggctgttcagccaccagatcagccaggcggcgagcccgactctgccacccggaccctgcagagcgtgcctgctgccgtcgtgtcgtgtcgggccagtgggccaccagatcggccacatccgtcttggcccatctccagcccgccagacccagggaggccatcacctcatcgacgccgcgccgggtggtctcatcaaccccgtcaaacagctcgggccacctcgatgatgccgtccgtgaacgatccagattcatgacatgctcctcttcacagatgccgacgacgatcaggccgtggccgtggcaacggggtgacctgccggcgcggctcacgacgttgagccggaaccacacgagacgcaccagtgtgctgcgccgtcttgagtcgggcgctgtactgggccctggcgctgtggtgaacagcccgacgaagcaccgaccgccggctgtcctcatcgccagggcgaggcatggggcgcggcatggtgcgcccggtagcagcatccatgagggtgatccggtcagccaaaatgccgagccggttttcccacttccggggccacggcaccagcaggtcacgctgacagcccacgccgtggcgtcggcagtccacaacattttctcacggccaggatgcgagtgcagcagctccaccggaacaccagcatcacgcacccgccgcatcgtgacctcatcctcacgtgccaccagcgggggagagcgactaccgctgcagccggtccaaagcgactcttcacagatgagggggtggatcggtagctgacccctaggtcctgatgtgggtcgaggtccttggaatgatggaagttcctacacacccatcgccaaagacctcaacatggacaacgctaccttcaccactccctcatctgtgaagagccagtttatgcacggtgttgaaagaggcgtcggtctacgacgaatgcgggttaatggtcttgcggtgtggggcgctgggcgatggcatcgagaacgcgtgagtgggtggcgatccattcggccgcgtcggggttgatgttgcgggcgacggtgtcgatcgctgttacgtagtgggcaagcctgcgaatctcagcttgttggtcagggtgagcgctgatgaggggctcttgatgggaggcgcggttacggacgtggcggatgagctccacgttttcctcgaagtcgcgtcggctacgccccgggtagtgaggcatacctccgttacgtaagtcagtgagagctttccatacggttgcttccaggcgcggggtgagcagaaagcgccagttgtccagtgacagactcgccacgatctgatcaggggtcgcatcgagcctcgcgcgccgcagtcgcttctcggccctgtcgacgttacgcgggaaaccaccgagccgatagctcggggattcccaccaacgccgtatgccagtatcggcgctcaggcgcacgtcaatgaagtttctcaggagtacctcgacatggctgatgtcttccaagaacgctttcgagatgcgggtgttccacacgtaccacgcatcgactggttcgatccggtagcggctgagcctggcgggtgagaaccactcctgcaacgtctcacgactcaccgtgggagcgtggtaggattgatgacgataggcctcgggaaggtcaatgccgcgaaatatcggtatacccccgaggccattgttttgcccaggcccctcctcgcatacttgcggggcgtcattggctgccgtcatctcgtctcttcccggtacgtggctgtccatgttcacgggcaggtacggcaatgaggttcccgcacacaaacctctaccaagcatacgctggcaagcccccctctcggccccaccacaacatcaattgctgactcgaacacctttgaggcagcgctttcggcttgcgcaaccccatccacgacaccgtccgcttactactcgaagctgagggattcagaccccacctacaccctcgattgtgaagagcctccaaagcccgatacaacgtctggcgagacaccgtgaacgacctcgccaccgcagcaacgcaccagcagcgcgggatggcttggtattagcccagcgcagggccccaggcaccagccctaacgaccccgcacccgacgtggctagaggataagccgcacgggaggactccatacccgccgactcattccagcccgccaccagccgagccatatgatcaaccgcccgcggtaaataatccagccactcacgccggtcgtataaggaaccggccccgctccaggcgtgtgcccaggatcgccacaacacgtcgagctcgaccaccacgcccggaatagattcccactccaaatccggatcagcggccgccacgtaccagatcggccacatccgtcttggcccatctccagcccgccagacccagggaggccatcacctcatcgacgccgcgccgggtggtctcatcaaccccgtcaaacagctcgggccacctcgatgatgccgtccgtgaacgatccagattcatgacatgctcctcttcacagatgccgacgacgatcaggccgtggccgtggcaacggggtgacctgccggcgcggctcacgacgttgagccggaaccacacgagacgcaccagtgtgctgcgccgtcttgagtcgggcgctgtactgggccctggcgctgtggtgaacagcccgacgaagcaccgaccgccggctgtcctcatcgccagggcgaggcatggggcgcggcatggtgcgcccggtagcagcatccatgagggtgatccggtcagccaaaatgccgagccggttttcccacttccggggccacggcaccagcaggtcacgctgacagcccacgccgtggcgtcggcagtccacaacattttctcacggccaggatgcgagtgcagcagctccaccggaacaccagcatcacgcacccgccgcatcgtgacctcatcctcacgctgccgatcaccgtcaaccagatggtcagccacgatggtgttcacaccccatgactcatgcagttgcctggccaaggcgcccaacacctgctgacgcacctgtgacttgacgtcatcatcctccagatcctgtgtaccaaccatcacggaggccaacacatcactgcgttgctgaaccagggtgttgacgacgtcgacatcgtcgatacccatgggattgttggcgcgcgcggccacggcatgaaacgtgttggactgcaaattctcgaccagaccacgccgatagtcgttgaactgggaggtgtcggcaatgacaccggtcatgatgtaggccgacccctcggacaaggccctgtaggactcgtcgacgaacgccaccaaccccggccgccgccggtaaagtcgacctgcttcctcgtcagccagcaaccatgacagtttttgccccatatgtcctccttgctgacatgacctcgaacatggtaaactttccgtaggaaaaacggggcaagtactttcgagcggctacctcggcccccggtggaatgtccagccttgtgcggaccgaagccgggggattccttatgtttgcggcaatgatgccgctgcaccccctcatgccgtggtgtggtcctttccccgtgtgcggtgtggtgcgtcgttgactggtttgtggccccgagccttactctgaccggtaggagaacggtgtggggtctacggatagcccactcggctcccggtggaatgtccaacagggtagggttgatgagttggtccatcaggaccgtcccggtggctgcgtcaatgatcgatatttcgatgatgcgcccgtccaggtcggtggtttcggtgtcgaggatgactccgactccgggttctaggagttggggatccaatgggtggtcatcgtgtggctcctacagggagtgtctgggctggacagcggtgcaatacccgcgccatagcggttttttctgcgggggtgacccacagctggtatttcgttttgacggcgatttggcgggccacgtagtcgcatctgtaggccttgttagggggtagccaggtcgctgcatccctgtctcgtttggcctcattagcgggtccgtcgacagccagcaagttcaacgggtcgttggccagggcggtgcgttgcagcggtgagagtttttgcgcgccggtaatccacgcgttcccgagggctacgacgtggtcgatttggactgttgtcgaggtgtgccggccgcgccgccaggcgagtgtggacccggtgtaggggtcgtggagtcgcccggagacgaccacgcatcgtgatccgggtttcaggtgggcctcgaccaggtcgcgggcaagggcatcgttgcgggtgtcgcatccgttgtggccccaggggcgggtcaa

SEQ ID NO: 99 - DNA, 17173 bp, Propionibacterium acnes
  source 1..17173: mol_type = genomic DNA
gtgttccagtgcctcgcgggcgtgatgttcttcttcggcaccttcttgccacatgcttcgcgcttcagcctcgccatccaagcgaacctggactgtgaacgagtcctcatcgggtccgtcctcattccacgcggcaatgatcccacgggcctcgtctgcgacctgactcaacttcatcgcctgcccgacagccccgagagccggaatctcgaacacccagatattcgcctcagccgagacctcacgatgggcgatcacttcgtaggtcgtctcaccttctactgtcgtgtccattacttccactccttcggaattttcacgcctgctcgctccagctgtgccaggacaccaactgacgtcagctggtgtcctgctggtatcgatacgcgcccggctccgccggggcgtccccagatttcatggcttcccttggcgttccgcagacgggcccatccttgagaacggagcagcttgaggacgtccttagttttctgcggtttcacacatcatagtatagccccacttaacttgtaaactaagcccctgtttacattttagttggtgcatgtgatccctgctcttatgacgtcgcccgacctggcgccttagacatgcactgttcatcctcaaccacactcaccgtcacgggtccgaaggcgaggtctatcaccattcgcatcgatgaagttgaagcaggatcgtccgcatcacgcactgccgatccggacagacgccaccggccgtaccgactgtttacgatctgccaccgcagactgctgccataaccgctatcacctctgatagtacgtttagtactatcagaggtgattcaagattctcctgtcgagcagccctacagtcacgaagtcctgcgatcgtcatcgcttaaggcagacggatggccatcggggaccactcgcaaagcaggggcgatcagcaacagtgatgtgccatgagcaagtactggtgcaccggctgtttactccgcccctagataaaccacgggtgcaggggtggacaccacaccatgaccgatgtggtgcccaccccatggctcacaggcaggccctatcgccgggagcactgctgcagatgaggctcagtaacctgccatgtctcacctggggccaaggtgccaagctccccacggaatctcaggcatcggaaaccagcagccgaacttccacagcatgagcgccctacgaaaaagcaggccgccgacggttctcaagaactcgccggcggcctgcatcgccactcgaactgtaaccgtggtccgaccccgtgcacaggtaagctccacactcccaccaggcatggccgaggcagtaccaagttgccgtggcccatcggcagatttggttaaattttgaaaagtcatatagactccttctgtaaatttttaaatctcataggactctcgccatcgccagccagcttcgacaggagtcccgatgtttcaccgagtgaaatatcggcaccgtttgagttgacctaaagctcaaaagatgctagaatccatcttacctcgttaggggcgttttgtcaaacgcccctatattgcgtgtcttcgcgcgtcgtagcgctgatgctgcgcctgtgtcgactatccgtttgtaagtactttcgatgacaccagcagtggctactcatgactggtgcgtgcgggtctaaagcagcagggaaaggaatcgcagtagaagccgcttgattcctatcacccctgatggtactatcagtactaacagagcagggcttactcgatgcgtgagaatcggggacatgctgagcctctcgtaggtcattggcctgctgggcgtcagtgtggcgcggttcgatccagtgaactctatcagctctgttagtactgtcagagttgatatattcgaccccaggaggagcccatgagttacatcgttcgcaccggaaatttggtcgacacccccgagctgcgtgagggagagcatggcccgtacacctacgctcgcgtcatcgtgtccgatcgcattcgccaggaggacggcagctacgtcaacgggccagcgatcgcctacgacgtcttggcgggtggcagccaagccgtgaatctggttgaagccgccaaggcgagcggcaacatccgcatcatgttcgcgggccgttaccgcgtcaccgagtggcggggtgagcagggcactcgtatccagcatgaggtccgagccgacgaagtgagcgtgagcctgctcggtcagagggtgaccgtggagcggcctcgaggtgacgtggcatccaaggagagcacgtcgttctgattgagtccgggggcacggtggtcgccgtggtaaaccgtgcccctgacagtactattgacactattggaggtatcagtgtgactgctcaaattttcgccttgtgcaaccagaagggtggcgtcggaaagtcgacatcgacgtttcatctggcccgtgccgcggtgttgcgtggccagcgtgtgcttgtcgtcgacaacgacccccagggcaacctgacgtctgtcgcggccgccgagcccgtgggggaggatcaggcggggctggccgatgtgctcagcgcgcgtgctccagagaccctccgcgatgtgatcgtgccgggaatctggtctggcctcgatgtcgtgccgacgtctggcatcacgctcggctgggtgcgtgacgaactcgtgatcgccggtgccggccgagaaggccggctgcgggaggccctggccggcgtcgaggacgactacgacgtgatcctgatcgactgtgctccatcgctcgatcagctcacgatcaacggcctggtggccgcccagggtgtcatcgtcgtgacgcactcgaagttgtggagcgccaacggcctcgcccagctgctcgacaccatcgacagcgtgcgcagctactacaacggcgcgctgcgcgtggcgggcatcatcgtcaaccagcacgaggagaacaccatcagcgggaaaacctggctcgacgagctgcatcaggctgccgagtcccggaagctgaccgtgcttgacccgccgatccccaagcgtgtcgtcatcgccgataccgtcgaggccgcgcgcggtctcgacgagtggggaagtgccgaggcggccgcgctcggccagttgtacgcccaccacctgacctgcatcgaaggagccctgtgatgacccgtccagccccccgaaagtcctcattgagcggatcaactccggtcgccccgccggctcagacggcgccggcaccgtctgccgcacctaccccccacaaggccgatgagtcacagacgagcagcaccacgaggaagtggcggcacaaggtgtcgttctaccaggacccggccgacaccgaccgggtgcgcggggcgatcctttacacgatgacgaccgagggcaaccggaacctgagccagttcgtcaacgatgccgtcatggccaaggtggtcgagctggaagtcaagtacaacgatggccagccattccccgctgtgggagcccgaggactaccccagggcggtgcagccgccgccggtgagtagaggaccatcgaccgtcgggggcttcaccatgcccccgaccctcggtcatcctgatcctcttgtcgatggtggtgacagtgggggattcacgcctcgttcagatcagaggaagtctcaccgcgtgattagtactatcaaatctgacagtactaacagagcagatagggttccctaggtcgagctgtatcacgccgacaaccagtgagccagtgatctacgaggggcgcaatatgcacccgatcggtagccgcgaaggcctcgccctgccccgatagtactatcaccactatcaatggtgctagtggtgagtttcttccattgatgacaacagcacagtgctgccgtctgtgtgcgggccaccagcccgcacacagttgccgtcgaggacgttgttcatgctctgtggtggccggtcctgagggcggctcgcaggatctcccggcgctcacggcgacgagcctggtagccaaggtctgcatgttcggcggcgagacgggctttgagggttgcggcttctgcacggcggtggagttggtcgtcgatgagttgggcgcgggccagacgccgcttatgggggttgtcgtgggtgaggggggcgtcgaggctgccgtcgtgggttagggccagggctgctcgttcggcgtcgtcgaggccgatgtggtggacggtcacgggtgcggtggtgacgtcgaggatgtccaggtggatgttgtggccgccgccgggggcttcggggaagtctggtgggctggcctggccggtgtcggggtcataccaggacaggccgatgatctcggcccagggtgggggcgggcagacggctcgcagaagggtgtgggccaggaacgtgttgcgggccatgatgcctccaagggtgaaaagcagtcgagtagcgatgacggcggggtagccgtctgctgggctgaggccgaccgggcccatgtcctcgatgctcttgtgctgcggccataccccaaagctaccaaacagtctttttaatctcaaagatacaaacagtgcttgacatattatctgcagcgaaagatactttcatcatggtggctgatcatgattacgcgactcctgacgatgagtggatgacacctcctcaggtggcccgtgtgattccgaacaccactgctcaggctgtccggcgctgggctgaggagggtcagcttcctggggcgtttcgtactccttctgggcgttggcatattccgtggtcggctgtggtgggcatcatggggtttgatccgcgtgagtccgcatcaccgagtgatcgtcaccagagctgacagagtcgtcgatgagctttcgagtgcagagctgatggcacgacggtctggatacttgtggagatgagagacgaccacatccagtcatggtcggggtacaccgaggggcagattcagcagtgctggcacgatgaggttgcccctgccattgactcgctcatggagcaggtaaggtctgttgccgagactcctgtgccgccgggttcgagattttacggcgatgagcagtgggccaagccttttcatccgtctactgcgatctgcggttcaatgggtccgccagcgatcacttgcacgcgctgaagctcctcgtctgggaagcgaacgtccaccatgtctatgcgccgtacacccttgctcgtgcatctattgaggcatcgtctactgctgtgtggctgttgagcacgaagacgcgcggagaacgtgtgctgcgagccttgcgatggtacgcgcaggattgtcacgactcgtgcaggttcatggatgatgagcagtatcgtgaccacctattgcggcgcattgaggggactgtcgctgcgggaaatctcgactcgcgcgctgctaggaaacggtaccgtgcaaccgatgttgtcgatgaggctgatcagctggttcccggaactctgagggcgtggcgagctttttctggtatggcccattcccgtatgtgggcatccagggggctgctcgacatggaagtgctgtccagtggccaaggaatggttacggcgaaggtgacgagcggatcggcccaaatcctttgggccgtcgtggcagctctgaatgttgctctcagtgccgctcgcttgtggcgtgattcgatgtgctcaccgtttgctgttgcccagtcggtagacgcgatgccagaggcgtttcgccgccctgtttagggtctgatcggggtagtgggtgttcacggggtcccaggttggccatggggcggcttggtgatgtgagttgggttgtgtggcagcctgggtgttgggtgtggcttcgttggccacgaaggcatgctcttccttgtgctgggacttgagtccccagtgctctcccctttgctagtggggggtggggtccccggaggtaggtcctccggggactttttctatgtctgtccgtgccccaggatttcgtatctaggcagtaccaattttgggttagttggaggtttctttggtaatggacagggtgagggtgatgaagaggtggccgtccttggtggcagaaattttctcgaacttcagctgaatgttgttatcagccactatctgttgggcggtgaggtgctcggagagcttctggaatccttcgcggatccacaggttgtaggggttggtgaccgagaccgaagggtatgggtcgaccttcagcgtcaggactggctggtctgggttgagggagttgatcttcaccagtttggggtaccggtcgcactcatgtgtctcttgtgttgggggccagcagtcgggggcccattcctcccagtggtcacgcatctcacgaagtactttcctgcatctcagcctctgcaggagctcgcgcgccaccgatgggagggctgccatgatgagggcaaggactgcgaacccgatgatgtaattgaccgtgtccctcgtcacgccgttcttgccgaggattccgatggcgaacgcgatgacgacaccgcccaggcacaggtgcatggggtcatgctgtgatggtttttcttcttcagcgactggtggggctatagtcatgtgtgccccttagtactaagtgatactggtgggttgcttttccccggtggccgtgtgcaagacggccaccggggttttccttcatgttcctgattttatctgcccggtgtggcgttttcatctttgtgtgggtggttcgcctggggtcttggagtgtggtgacgcggtgatggtcacggtgacggtgactgtggcgcgtggcgggtgaggtggttctttcctggtctggtgtgtggcccaggtgagtgtggtgatgagggccagggtgaggatgatgaccagggtggggagtagtttgtctggccggtgtcgccgggcttggtggcgcggcatgtttttccagggtgtgtctccgaacaggtcgtcgtcggaggggtcgtcgtggttcatagggtggccttggcgatggtggtgggcgagtttggtccaggtgatggtgccgtcggaggcgatgtggcggtcggcgggcagggtgtggacggtccatccggcgtcggtgagggcggtggtgaaggatttcttgatggatcgtttgggtaggtcgatgggggcgtgggtgccgacccagatgcaccggtttttgaggtgggtggcgccgaggtggttcatgtcgcggaccatgttttgggtgagtgtgagggtgtcggggtcccattggacggggatgatgatgtggtctgcgatggtgatggcgtgttgccaggcggcgtcgaggtcgttgtttccggtgtcgaggatgatgacgtggaagcggcttcttagggcggtgatgatgcggtcgaggtcgtcggcggtggggggtgtgatgaggctgttgtggttgtcggtgatggtgggtaggcatgtgatggtggcccagccttctggttgccaggagatgtaggggccgaggtcgcggggttgggaggcgaatcctgggtgacgggctgcgcgggcgaggtcgatgacggtgttgtcggtgtggcggggtgcgcgggtggagagggtgccgcgtgggttgatttccacgacgacgatgtcgtcgtgtcctgctgtggtggcgagggcttgggcaaggatgacggccagcggggttttgccggtgccgcctttgaggttggcgagggtgatgatgtggtcggtgagttgggcgggtgcggcggtgtggtgagggttggcggtgaggttggcgatggtgaacagggcatcgagatcgtcggtggtgttctgctcggtgggttgggggtcgccggagatgatcgggtcggcgcggcgcggctgccatgccggcctcaccactgtcacgaccaccacgggtctgctggcgctgtgtgggtgtcgtcggcgatgactcacgatcggcagtctcaccatcgtctcggtgatgctcggctagcgctggacccggtcaagttcgggccggctcacccagtggtgatgactcggtcacagaaccgctgccggtcgttatctcggacgtctcgactcctccagtcctgatgggcgttggagccacctacacctactctcagaacgaccccgacctcgtgtggggcgggggcagatgtcacttgggccaatcgagagcccaggtgatggggaaagcaggggtgtgatatctgtcctggaaaactgggcagctgctaccgtggattgacggatctccacgaaagaagggaatgcgaccatgcagatcaccgtcaagaccatcaaagatcatcgggttcgcactgtccagaccgccatgagcagcgccttggggattggttcccaggtagacatgctcgcccccggcggttccaccagctcgagttccggttcatgctgctcgtgctcgacctgcgcggtagtggcgcagcctcaagactgaacggctggtcagccccaggggcgtggcgctcatcgcgtcacgccccttctattcgctggacagggtgcgcgagctgaggaacatcgcggtgtgtgcgatgacgaggggcaggagcaagtctgtgcgggttgccaagtagccctgcgcgatggccatcacgctggccccgacggcggcgaagacacctccgatacgtcgcttcatgccgccgaattgcatcaggacgaataggactcccgcggtccacatccctccgggcatgcatctgggaaagatgaaccggaagatgatctcttcacaggagagctggagtactagcagcgtagcccccacggggagactcacctctactgacagacggatcgtcttcatccacccacccgagctggcatcgaccatttcggtggccatgcgcgaccggtggcctcgtgcctctcgctgcgtgtcgatccagccgagcagtccgtggacgctctccgctaggactcctgacgcgacagtctcaccaattcctaagcccacggcgaggaccgcgacgcccccctgcacggcaggctgtgtgacttggtggtcccaccaacccgccggcaggaccatgcgtgcgaggctgcacacgagcaggaggtggagggtcacgacgagcgacatctggaataccgcttgccgttcggcgatggtggcgttgggaaagagcggtaggccggcacgggcagcggcgctcgacagcttccgcaagagcggtttggagacgaagtagtaggcgacgtacagcgccagcgctgtcgcgatgatgatcatcggtctgccaccgagctgacccgccgatagccgtttctgttccaccaatactggctgttgtagatcaggtggcccagaacacaggcccagatcccccagaagatgaacaggatagtccccaaggcggcgagcgggatcttggagaggacctgtccccgtccgaacaccgagtggccgcaagcaaacaagagtgctcccacagcggtgagcgcgagccaggccggggttgctcgcagactgatcaccgggaccccgacccggaagccgacctcttctcctacagcgatgactagcaactgccacagcggcatgttctgaacggagcgcgcgactcgggctcgagtcacccacacgggctgttgagcgctcacatcaccactcaggtaccccggtgaggcacttcgcttagtactggggcccgatgtgcgagcattcgtgatgtgtcgcaggatccggttgtcaagccaagaggccagcagggctccggcgacagtgacgggtagcccgatcagcacgaggccccagccatgcggtgccgagaggtttctggccggcgtgcacgcgaggcaggcaaatgccatcactgccagcactacgacgtagatggtcgcataattcgacttgcgggtgacgttgccgaccatcttggccaaagtcgctggggaccagctgatgagtgcgatggtggtcagcaggaagcaggaccagacagacatccggcgcactcaggggtatgggtgcggctgtgggttttggaaaccgccatatgcggcgtagcgggggtgtgcccgcatgggtgcgctgggcagtgacagggcgagcagcccaggcgcccagagcctgacacagtgcagtcccagcccctggatctctatggtggtgaaatcttcgatgtacaggggtgacacacaggtgatgctgttgaccacgctctttaccagttccgcccccgtgtgggtgtcgtcaggtggcaggtcttcggcttgggcaatggtgcccgcgtcgaatttcgccacaactgattgcgcggcctgatagttcctcgcgtagtaggagacgttcgagtcgaggtcaagcatgtcctccgtggacatactggacgcgtcggcctcggcgtcgaaagacgtccataccgcgagcatccgaaccccgctgcactcgagaaacgccttgtacatggctgcttccagacccgcgtctgcacctaggccgacggcgacgaggggaagttggttgccactaccgaccatcatgcatgccacggtgaaatgcttgagcccgggagtcggaagccagtagaaacgcagttcgtggcttcggcccgctgcacgttccacgagccgctggatgcgctggaggcggggtccttcgacgcggatgcgcacaggtgacgaggctccataccacaggcccatcgcggcatctacctggatcaattcataagccgcggacagcgttgcggcgacgcgtgaagtgtggacggcggtgccggtcgtcacggccgttcccagccacggctcaccgtcgtgccgacgggggttgtaacccaggtaaaagaactgcgccgggatccactcctgccgggaggtcccgacacggggagtcttgacccatgtcatgggcaagtcgtcgcgataggtgtcgaacgcacctccagccactcgttgcgcgaagccgaatgcgcccagatcgagaacttcgtcctcggtccgggcgaggagttcctgacgagtcgcccagcgccgttcgaagggactatggagaatcccggtacccgcgcagtagcgctcgacggcctccgcgtagaccttgatctctgcctcaaactcgttcagccccaccccaccgatgtggtagctacccggcttggggtcgggccggtcaagcagtgcgtgcatccccgtgagttccccaccgttcacccgcacgcgggggccgagcgcggggtgcagcgagtagccgacggaagtcaccagcccgcatagcgggctgtaggtgcgccgcctgagccgggctgcggtctcgacggggtcgctatcctggcgaagcttcatcgctcgccccctgccgccagccactcacggatgtcgtagtacaggtccggagcggtttcaacctgcgctggtgcatcaaaacgggacataggtaggacgtcgttgtaggcgatctccatcgtcggtatgtagaccgacaacactttgttgcgcgtcgtgttgaggccgttgcgggcgatgctgacagcctcatgcgcgacgtgcgcggccaagatcgcgcgcaccgacgctgccacggccggcgctccggcccttacgcggtcggcagcggccacccgcatccaggacaggtagctctgccgttcgcgcaggttcatcgcgacccgctgctcgaaggtccggtaggacgaggtcgcaccagggacgacgtagggacccacgtacaaggccggcccgtctacagctgcgtggagccacgacaggtgggcgcgtcgggcgaacaggtcaagggcgcgcagcatagccgggttgttctgcgccagcgctaccacaaggagtggctgcaggtccggcgccgaacccagcaacgccaacatctgggaggcctcctgctccatgtgcaactcgtcggccgactgctcaagccgcaggcctgcgaagagggtggctgatggctgcgtgtcgtcagcgaggacggtagcctgcagcccctctccctcgagaatctgctggatatcgccggcgaggagcgcgtcgtcgctgaatacccacaccgggcgcgtctctctacctccatccatcttgtcctcaacgttttcgaccagcgcaccgatcgatgctaggtgggccatcacgtcgtcaagggccgcgcgggtcaatccgggcacccgggacacgatctcgggcggctgcagtccttggctcaacaagtccaaggccggccacagggtcccggtggcgtcgtcgtcctccagcgttgtgctctcggcgttccagacgcctcgacggaactccaccctgtccatcgagtaaggcaccatcatgaggcccggtgaaatgtggttggtcactttggctcctgtacagcctaggcttggacgcccacggtcatggtgtgggtcgcggtttggaaaatcccgtcgaggttgagtgcctgattgagttcgtcctcgtagaagcttgaggactcgactgaggcaagaccgagccccgtgcagaccaagttgatctgttgtgcgatcgccccgacttcttgaagggcgaacctcaaacccctggctccgtacttccgcatcgccctccacggcgagatgacgaacaccaagtgcactccggccgcatccgattgctccacggccggctcgccggccatcgaattcctcacgccgcgacagccctcttcaccggtcacgggcaccagtcgatcgatgaccggcgagtagcggtagacgccgcgactcaagccggacacccgttgtgcggacatgaagatagacacgggatacagccctccaccagacgggacagcgcgtacattataccgcacgatatcaccgctcgaacgtgggacatccacgtgccccgtcacaccggcagcacctctcagaaacgcagctacgtcacgcaggtctagggattcgccggtgtagttccgtccgctgcgccggcgggcgatcacttgctcgaggggtgcgcgcaccctgctggacctgggaagttcgatcacatcggcagcgaacgtgtcgcgatccatctgtccgtacgtaacgatcatggggtcaacgaaatagtcgccgaccgagacgttgaactccatatccccccgggcgatgcgcgaggcgagcaagaagtctgcagctgcgttagacagccccggcccatcagtgttgtcgcagcggaactcgtgggtccgaaaccccacaccttccgtgcccgggctctgcgctcgatacgacgtgatcgcagaactagccttccttaaaccgcccggagtagctaccatgaccgtcccctctgaggtctcccgaacacttgcgacaatagcagcatgtgggggcagccgccagaggcgggcatccttgtctcgacaaccattgacctccggattcgatatgtgcataatcatagtcgtgccaacacgaaacgtgtacgtctcggaagacgacctagacctgttcgccgaagccaccgagatcgctggaggcctgtccgcagcggtgttggaggccttgcgcagctacgtagacaggcaccatcgcgcggccggcggattcgacgagatcgagctggagctgcagaacgacggtatcgaccaccgtgtcaccttcatgggtcgccgcctgatacacatccgccgtccagatcccgagggaacccgcatagacactgtctacttgaccgccaaacaccaattcgccgttgccaccaaaatccaacgacggctgccagactggacggccggccacgagcacatctggtccgacccggagacctggaatcgggagttctggatcgcaggtgacaagacgatggccgtgtatcccagccttgacaaactccgcgaagctgaccccaatgtggccgaacgcgccgaggccgcggtcaaaatcccgccgttcgaggtcctggacatctgatgacagaatcatcatcttcccggcggcaattggcaatgccggtgctgtcagtcacggatctagccaagaaatacgtggttcatggcggctacgaggtcccggcactcaacggtgtctcgtttgacctgcacccgggagagatgctgggtttgttcgggccaaacggtgctggaaagacgacgctggtcaggatcatcgcgggcctcttatcggcagattctggagacgtccactggggatcggatcaaggtcgggccaggttaggctacgtgtcccaaaagggtggactgcagtacgggctcacgtgccgggaagagatggtcttccacgcacaatgcttcggccagtccgccaagcaggcccggactagcgtcgacgaggtcgccgcgatgctgcactgcgattacctgatggagtgggacgtcggaaggctctccggtgggcaacgccgaatcatcgaggtagggctagcactcgtcaatcaaccatcggtcgtcctgctcgacgagcccaccctgggcctggaccccgcaacacgcctgtcgttgtggcaaacggtaaagtcggcacgccgtgagaccggtgctgccttcctcgtcaccacccactacattgacgaggtggccgagcacctgtccaacgtcagcgtgatcaaccacggaaccgtcgtcgccaacggctcgccagcgcacatccgagaaatgttcgcgaccggggaagtaacgctcggcgtggccgaggatacggtggacagtgcggtggacgtgttggctgggaccgcgttcgaggcgcaccccaccgaaaccgtcccggggatcgtggtcaggtccaggcatcccgacgtggacgcggccaagatcatcaccatcctggctggtcatggcatctcggtggactccatatccgtacgcgaggcgaccttggaagaggcgtttctcacgatcacaggcagtcgagacccggagaggcaaatcccatgaacacttgcttcaggcgatatgcggcgatgtcgctgagagcgcggcgtgatttggccctgacattcatccagcccctcgtctacctagccctcttcggaccgctcttcgtcacgacgatgaagatgtcgcagagagctaccgccgctacgggttactccctatacatcacgggcctgtccatccaaatggccatgacgatcggtgccttcgcggggctaaccatcatcctcgaataccgactcggcatcctcgaacggatctggagcacccccctcacggggagcaagatgatggcggggcgaatcgcgcgcgacgtcgttatgatgatgatgccgatactggtcgtcttcatcatcggcctggtgctgggaacacgccccagcccactgggcctggcgacctacttcgtgacagtgctcggcacaggagccacgttcgccggggtctcctacgcggtggcactcagaacgaagagcgaggcagcgctatccgcgatcttcaacctcatcctgctacccatcctcctgctgtcggggatcatgctgcccatgtcgttcgcaccacactggatcgccaccgctgcccacgtgaacccgttgtggtacctggtgcaaggcgcgcggaaccagttcagcgttctagggctcgtggcggcggccccatggagttgggctgtggccatcgtcatgtcagccgctgccttcggctgggcaagccacgaattcaacaagaggcgctgacacaaagaatggtgccgggaacccaggtccccggcaccaccgagtgcactcgcgacgtcaacgcaccgttgcggtcactgcgcaggtcgagcacgaggacgacgagcccgcgctgctgcaggtcgagccgccaggcgcgagcaggtcgacgttagcgtcggcgccgccgaagacggacgtgacggccggctgagaggtgcggatgcggtgctccagcgaggaggtggtggtgagtttcatgggaggtgctcctaggagtgagacgagaacaaaccctagcgataggttagcagtccgcaaccgactccgggaatagtagaagcgcgcatccgtagcggaagaccttagcctgattacagtgaccctgttcgcgtctcaacattattccacacccccgagcagcgaacgacaccgcgatgatgatccgtcgcctctccaccgaagaactccgcgcccacatcgcaccgggccgccgtcccgtgcatcagacctgccgtcaacgtcggccatgaagctgggaaggtggctctcgtctaggagcagacgcgggacgcctcctccaggttgggccggggaagtgtccggttcttgatgtaggtggcggtccctattgatgggcgttgaccgtgggaatgcggtcggcgaagggggtggcgaacccgttgagcgcaggcttccagcgcatgcatcaacgctgtctgccggccaccggcaagcctcacccgcccgtcatggccatcatcgaggtgccggtgaatcctcgacacatgatcccaactcccccggaggggcttccggggctgttcagccaccagatcagccaggcggcgagcccgactctgccacccggaccctgcagagcgtgcctgctgccgtcgtgtcgtgtcgggccagtgggccaccagatcggccacatccgtcttggcccatctccagcccgccagacccagggaggccatcacctcatcgacgccgcgccgggtggtctcatcaaccccgtcaaacagctcgggccacctcgatgatgccgtccgtgaacgatccagattcatgacatgctcctcttcacagatgccgacgacgatcaggccgtggccgtggcaacggggtgacctgccggcgcggctcacgacgttgagccggaaccacacgagacgcaccagtgtgctgcgccgtcttgagtcgggcgctgtactgggccctggcgctgtggtgaacagcccgacgaagcaccgaccgccggctgtcctcatcgccagggcgaggcatggggcgcggcatggtgcgcccggtagcagcatccatgagggtgatccggtcagccaaaatgccgagccggttttcccacttccggggccacggcaccagcaggtcacgctgacagcccacgccgtggcgtcggcagtccacaacattttctcacggccaggatgcgagtgcagcagctccaccggaacaccagcatcacgcacccgccgcatcgtgacctcatcctcacgtgccaccagcgggggagagcgactaccgctgcagccggtccaaagcgactcttcacagatgagggggtggatcggtagctgacccctaggtcctgatgtgggtcgaggtcct

SEQ ID NO: 100 - DNA, 599 bp, Propionibacterium acnes
  source 1..599: mol_type = genomic DNA
accagatcggccacatccgtcttggcccatctccagcccgccagacccagggaggccatcacctcatcgacgccgcgccgggtggtctcatcaaccccgtcaaacagctcgggccacctcgatgatgccgtccgtgaacgatccagattcatgacatgctcctcttcacagatgccgacgacgatcaggccgtggccgtggcaacggggtgacctgccggcgcggctcacgacgttgagccggaaccacacgagacgcaccagtgtgctgcgccgtcttgagtcgggcgctgtactgggccctggcgctgtggtgaacagcccgacgaagcaccgaccgccggctgtcctcatcgccagggcgaggcatggggcgcggcatggtgcgcccggtagcagcatccatgagggtgatccggtcagccaaaatgccgagccggttttcccacttccggggccacggcaccagcaggtcacgctgacagcccacgccgtggcgtcggcagtccacaacattttctcacggccaggatgcgagtgcagcagctccaccggaacaccagcatcacgcacccgccgcatcgtgacctcatcctcacg

SEQ ID NO: 101 - DNA, 17175 bp, Propionibacterium acnes
  source 1..17175: mol_type = genomic DNA
gtgttccagtgcctcgcgggcgtgatgttcttcttcggcaccttcttgccacatgcttcgcgcttcagcctcgccatccaagcgaacctggactgtgaacgagtcctcatcgggtccgtcctcattccacgcggcaatgatcccacgggcctcgtctgcgacctgactcaacttcatcgcctgcccgacagccccgagagccggaatctcgaacacccagatattcgcctcagccgagacctcacgatgggcgatcacttcgtaggtcgtctcaccttctactgtcgtgtccattacttccactccttcggaattttcacgcctgctcgctccagctgtgccaggacaccaactgacgtcagctggtgtcctgctggtatcgatacgcgcccggctccgccggggcgtccccagatttcatggcttcccttggcgttccgcagacgggcccatccttgagaacggagcagcttgaggacgtccttagttttctgcggtttcacacatcatagtatagccccacttaacttgtaaactaagcccctgtttacattttagttggtgcatgtgatccctgctcttatgacgtcgcccgacctggcgccttagacatgcactgttcatcctcaaccacactcaccgtcacgggtccgaaggcgaggtctatcaccattcgcatcgatgaagttgaagcaggatcgtccgcatcacgcactgccgatccggacagacgccaccggccgtaccgactgtttacgatctgccaccgcaggctgctgccataaccgctatcacctctgatagtacttttagtactatcagaggtgattcaagattctcctgtcgagcagccctacagtcacgaagtcctgcgatcgtcatcgcttaaggcagacggatggccatcggggaccactcgcaaagcaggggcgatcagcaacagtgatgtgccatgagcaagtactggtgcaccggctgtttactccgcccctagataaaccacgggtgcaggggtggacaccacaccatgaccgatgtggtgcccaccccatggctcacaggcaggccctatcgccgggagcactgctgcagatgaggctcagtaacctgccatgtctcacctggggccaaggtgccaagctccccacggaatctcaggcatcggaaaccagcagccgaacttccacagcatgagcgccctacgaaaaagcaggccgccgacggttctcaagaactcgccggcggcctgcatcgcaactcgaactgtaaccgtggtccgaccccgtgcacaggtaagctccacactcccaccaggcatggccgaggcagtaccaagttgccgtggcccatcggcagatttggttaaattttgaaaagtcatatagactccttctgtaaatttttaaatctcataggactctcgccatcgccagccagcttcgacaggagtcccgatgtttcaccgagtgaaatatcggcaccgtttgagttgacctaaagctcaaaagatgctagaatccatcttacctcgttaggggcgttttttcaaacgcccctatattgcgtgtcttcgcgcgtcgtagcgctgatgctgcgcctgtgtcgactatccgtttgtaagtactttcgatgacaccagcagtggctactcatgactggtgcgtgcgggtctaaagcagcagggaaaggaatcgcagtagaagccgcttgattcctatcacccctgatggtactatcagtactaacagagcagggcttactcgatgcgtgagaatcggggacatgctgagcctctcgtaggtcattggcctgctgggcgtcagtgtggcgcggttcgatccagtgaactctatcagctctgttagtactgtcagagttgatatattcgaccccaggaggagcccatgagttacatcgttcgcaccggaaatttggtcgacacccccgagctgcgtgagggagagcatggcccgtacacctacgctcgcgtcatcgtgtccgatcgcattcgccaggaggacggcagctacgtcaacgggccagcgatcgcctacgacgtcttggcgggtggcagccaagccgtgaatctggttgaagccgccaaggcgagcggcaacatccgcatcatgttcgcgggccgttaccgcgtcaccgagtggcggggtgagcagggcactcgtatccagcatgaggtccgagccgacgaagtgagcgtgagcctgctcggtcagagggtgaccgtggagcggcctcgaggtgacgtggcatccaaggagagcacgtcgttctgattgagtccgggggcacggtggtcgccgtggtaaaccgtgcccctgacagtactattgacactattggaggtatcagtgtgactgttcaaattttcgccttgtgcaaccagaagggtggcgtcggaaagtcgacatcgacgtttcatctggcccgtgccgcggtgttgcgtggccagcgtgtgcttgtcgtcgacaacgacccccagggcaacctgacgtctgtcgcggccgccgagcccgtgggggaggatcaggcggggctggccgatgtgctcagcgcgcgtgctccagagaccctccgcgatgtgatcgtgccgggaatctggtctggcctcgatgtcgtgccgacgtctggcatcacgctcggctgggtgcgtgacgaactcgtgatcgccggtgccggccgagaaggccggctgcgggaggccctggccggcgtcgaggacgactacgacgtgatcctgatcgactgtgctccatcgctcgatcagctcacgatcaacggcctggtggccgcccagggtgtcatcgtcgtgacgcactcgaagttgtggagcgccaacggcctcgcccagctgctcgacaccatcgacagcgtgcgcagctactacaacggcgcgctgcgcgtggcgggcatcatcgtcaaccagcacgaggagaacaccatcagcgggaaaacctggctcgacgagctgcatcaggctgccgagtcccggaagctgaccgtgcttgacccgccgatccccaagcgtgtcgtcatcgccgataccgtcgaggccgcgcgcggtctcgacgagtggggaagtgccgaggcggccgcgctcggccagttgtacgcccaccacctgacctgcatcgaaggagccctgtgatgacccgtccagccccccgaaagtcctcattgagcggatcaactccggtcgccccgccggctcagacggcgccggcaccgtctgccgcacctaccccccacaaggccgatgagtcacagacgagcagcaccacgaggaagtggcggcacaaggtgtcgttctaccaggacccggccgacaccgaccgggtgcgcggggcgatcctttacacgatgacgaccgagggcaaccggaacctgagccagttcgtcaacgatgccgtcatggccaaggtggtcgagctggaagtcaagtacaacgatggccagccattccccgctgtgggagcccgaggactaccccagggcggtgcagccgccgccggtgagtagaggaccatcgaccgtcgggggcttcaccatgcccccgaccctcggtcatcctgatcctcttgtcgatggtggtgacagtgggggattcacgcctcgttcagatcagaggaagtctcaccgcgtgattagtactatcaaatctgacagtactaacagagcagatagggttccctaggtcgagctgtatcacgccgacaaccagtgagccagtgatctacgaggggcgcaatatgcacccgatcggtagccgcgaaggcctcgccctgccccgatagtactatcaccactatcaatggtgctagtggtgagtttcttccattgatgacaacagcacagtgctgccgtctgtgtgcgggccaccagcccgcacacagttgccgtcgaggacgttgttcatgctctgtggtggccggtcctgagggcggctcgcaggatctcccggcgctcacggcgacgagcctggtagccaaggtctgcatgttcggcggcgagacgggctttgagggttgcggcttctgcacggcggtggagttggtcgtcgatgagttgggcgcgggccagacgccgcttatgggggttgtcgtgggtgagggtggcgtcgaggctgccgtcgtgggttagggccagggctgctcgttcggcgtcgtcgaggccgatgtggtggacggtcacgggtgcggtggtgacgtcgaggatgtccaggtggatgttgtggccgccgccgggggcttcggggaagtctggtgggctggcctggccggtgtcggggtcataccaggacaggccgatgatctcggcccagggtgggggcgggcagacggctcgcagaagggtgtgggccaggaacgtgttgcgggccatgatgcctccaagggtgaaaagcagtcgagtagcgatgacggcggggtagccgtctgctgggctgaggccgaccgggcccatgtcctcgatgctcttgtgctgcggccataccccaaagctaccaaacagtctttttaatctcaaagatacaaacagtgcttgacatattatctgcagcgaaagatactttcatcatggtggctgatcatgattacgcgactcctgacgatgagtggatgacacctcctcaggtggcccgtgtgattccgaacaccactgctcaggctgtccggcgctgggctgaggagggtcagcttcctggggcgtttcgtactccttctgggcgttggcatattccgtggtcggctgtggtgggcatcatggggtttgatccgcgtgagtccgcatcaccgagtgatcgtcaccagagctgacagagtcgtcgatgagctttcgagtgcagagctgatggcacgacggtctggatacttgtggagatgagagacgaccacatccagtcatggtcggggtacaccgaggggcagattcagcagtgctggcacgatgaggttgcccctgccattgactcgctcatggagcaggtaaggtctgttgccgagactcctgtgccgccgggttcgagattttacggcgatgagcagtgggccaagccttttcatccgtctactgcgatctgcggttcaatgggtccgccagcgatcacttgcacgcgctgaagctcctcgtctgggaagcgaacgtccaccatgtctatgcgccgtacacccttgctcgtgcatctattgaggcatcgtctactgctgtgtggctgttgagcacgaagacgcgcggagaacgtgtgctgcgagccttgcgatggtacgcgcaggattgtcacgactcgtgcaggttcatggatgatgagcagtatcgtgaccacctattgcggcgcattgaggggactgtcgctgcgggaaatctcgactcgcgcgctgctaggaaacggtaccgtgcaaccgatgttgtcgatgaggctgatcagctggttcccggaactctgagggcgtggcgagctttttctggtatggcccattcccgtatgtgggcatccagggggctgctcgacatggaagtgctgtccagtggccaaggaatggttacggcgaaggtgacgagcggatcggcccaaatcctttgggccgtcgtggcagctctgaatgttgctctcagtgccgctcgcttgtggcgtgattcgatgtgctcaccgtttgctgttgcccagtcggtagacgcgatgccagaggcgtttcgccgccctgtttagggtctgatcggggtagtgggtgttcacggggtcccaggttggccatggggcggcttggtgatgtgagttgggttgtgtggcagcctgggtgttgggtgtggcttcgttggccacgaaggcatgctcttccttgtgctgggacttgagtccccagtgctctcccctttgctagtggggggtggggtccccggaggtaggtcctccggggactttttctatgtctgtccgtgccccaggatttcgtatctaggcagtaccaattttgggttagttggaggtttctttggtaatggacagggtgagggtgatgaagaggtggccgtccttggtggcagaaattttctcgaacttcagctgaatgttgttatcagccactatctgttgggcggtgaggtgctcggagagcttctggaatccttcgcggatccacaggttgtaggggttggtgaccgagaccgaagggtatgggtcgaccttcagcgtcaggactggctggtctgggttgagggagttgatcttcaccagtttggggtaccggtcgcactcatgtgtctcttgtgttgggggccagcagtcgggggcccattcctcccagtggtcacgcatctcacgaagtactttcctgcatctcagcctctgcaggagctcgcgcgccaccgatgggagggctgccatgatgagggcaaggactgcgaacccgatgatgtaattgaccgtgtccctcgtcacgccgttcttgccgaggattccgatggcgaacgcgatgacgacaccgcccaggcacaggtgcatggggtcatgctgtgatggtttttcttcttcagcgactggtggggctatagtcatgtgtgccccttagtactaagtgatactggtgggttgcttttccccggtggccgtgtgcaagacggccaccggggttttccttcatgttcctgattttatctgcccggtgtggcgttttcatctttgtgtgggtggttcgcctggggtcttggagtgtggtgacgcggtgatggtcacggtgacggtgactgtggcgcgtggcgggtgaggtggttctttcctggtctggtgtgtggcccaggtgagtgtggtgatgagggccagggtgaggatgatgaccagggtggggagtagtttgtctggccggtgtcgccgggcttggtggcgcggcatgtttttccagggtgtgtctccgaacaggtcgtcgtcggaggggtcgtcgtggttcatagggtggccttggcgatggtggtgggcgagtttggtccaggtgatggtgccgtcggaggcgatgtggcggtcggcgggcagggtgtggacggtccatccggcgtcggtgagggcggtggtgaaggatttcttgatggatcgtttgggtaggtcgatgggggcgtgggtgccgacccagatgcaccggtttttgaggtgggtggcgccgaggtggttcatgtcgcggaccatgttttgggtgagtgtgagggtgtcggggtcccattggacggggatgatgatgtggtctgcgatggtgatggcgtgttgccaggcggcgtcgaggtcgttgtttccggtgtcgaggatgatgacgtggaagcggcttcttagggcggtgatgatgcggtcgaggtcgtcggcggtggggggtgtgatgaggctgttgtggttgtcggtgatggtgggtgggcatgtgatggtggcccagccttctggttgccaggagatgtaggggtcgaggtcgcggggttgggaggcgaatcctgggtgacgggctgcgcgggcgaggtcgatgacggtgttgtcggtgtggcggggtgcgcgggtggagagggtgccgcgtgggttgatttccacgacgacgatgtcgtcgtgtcctgctgtggtggcgagggcttgggcaaggatgacggccagcggggttttgccggtgccgcctttgaggttggcgagggtgatgatgtggtcggtgagttgggcgggtgcggcggtgtggtgagggttggcggtgaggttggcgatggtgaacagggcatcgagatcgtcggtggtgttctgctcggtgggttgggggtcgccggagatgatcgggtcggcgcggcgcggctgccatgccggcctcaccactgtcacgaccaccacgggtctgctggcgctgtgtgggtgtcgtcggcgatgactcacgatcggcagtctcaccatcgtctcggtgatgctcggctagcgctggacccggtcaagttcgggccggctcacccagtggtgatgactcggtcacagaaccgctgccggtcgttatctcggacgtctcgactcctccagtcctgatgggcgttggagccacctacacctactctcagaacgaccccgacctcgtgtggggcgggggcagatgtcacttgggccaatcgagagcccaggtgatggggaaagcaggggtgtgatatctgtcctggaaaactgggcagctgctaccgtggattgacggatctccacgaaagaagggaatgcgaccatgcagatcaccgtcaagaccatcaaagatcatcgggttcgcactgtccagaccgccatgagcagcgccttggggattggttcccaggtagacatgctcgcccccggcggttccaccagctcgagttccggttcatgctgctcgtgctcgacctgcgcggtagtggcgcagcctcaagactgaacggctggtcagccccaggggcgtggcgctcatcgcgtcacgccccttctattcgctggacagggtgcgcgagctgaggaacatcgcggtgtgtgcgatgacgaggggcaggagcaagtctgtgcgggttgccaagtagccctgcgcgatggccatcacgctggccccgacggcggcgaagacacctccgatacgtcgcttcatgccgccgaattgcatcaggacgaataggactcccgcggtccacatccctccgggcatgcatctgggaaagatgaaccggaagatgatctcttcacaggagagctggagtactagcagcgtagcccccacggggagactcacctctactgacagacggatcgtcttcatccacccacccgagctggcatcgaccatttcggtggccatgcgcgaccggtggcctcgtgcctctcgctgcgtgtcgatccagccgagcagtccgtggacgctctccgctaggactcctgacgcgacagtctcaccaattcctaagcccacggcgaggaccgcgacgcccccctgcacggcaggctgtgtgacttggtggtcccaccaacccgccggcaggaccatgcgtgcgaggctgcacacgagcaggaggtggagggtcacgacgagcgacatctggaataccgcttgccgttcggcgatggtggcgttgggaaagagcggtaggccggcacgggcagcggcgctcgacagcttccgcaagagcggtttggagacgaagtagtaggcgacgtacagcgccagcgctgtcgcgatgatgatcatcggtctgccaccgagctgacccgccgatagccgtttctgttccaccaatactggctgttgtagatcaggtggcccagaacacaggcccagatcccccagaagatgaacaggatagtccccaaggcggcgagcgggatcttggagaggacctgtccccgtccgaacaccgagtggccgcaagcaaacaagagtgctcccacagcggtgagcgcgagccaggccggggttgctcgcagactgatcaccgggaccccgacccggaagccgacctcttctcctacagcgatgactagcaactgccacagcggcatgttctgaacggagcgcgcgactcgggctcgagtcacccacacgggctgttgagcgctcacatcaccactcaggtaccccggtgaggcacttcgcttagtactggggcccgatgtgcgagcattcgtgatgtgtcgcaggatccggttgtcaagccaagaggccagcagggctccggcgacagtgacgggtagcccgatcagcacgaggccccagccatgcggtgccgagaggtttctggccggcgtgcacgcgaggcaggcaagtgccaacactgccagcactacgacgtagatggtcgcataattcgacttgcgggtgacgttgccgaccatcttggccaaagtcgctggggaccagctgatgagtgcgatggtggtcagcaggaagcaggaccagacagacatccggcgcactcaggggtatgggtgcggctgtgggttttggaaaccgccatatgcggcgtagcgggggtgtgcccgcatgggtgcgctgggcagtgacagggcgagcagcccaggcgcccagagcctgacacagtgcagtcccagcccctggatctctatggtggtgaaatcttcgatgtacaggggtgacacacaggtgatgctgttgaccacgctctttaccagttccgcccccgtgtgggtgtcgtcaggtggcaggtcttcggcttgggcaatggtgcccgcgtcgaatttcgccacaactgattgcgcggcctgatagttcctcgcgtagtaggagacgttcgagtcgaggtcaagcatgtcctccgtggacatactggacgcgtcggcctcggcgtcgaaagacgtccataccgcgagcatccgaaccccgctgcactcgagaaacgccttgtacatggctgcttccagacccgcgtctgcacctaggccgacggcgacgaggggaagttggttgccactaccgaccatcatgcatgccacggtgaaatgcttgagcccgggagtcggaagccagtagaaacgcagttcgtggcttcggcccgctgcacgttccacgagccgctggatgcgctggaggcggggtccttcgacgcggatgcgcacaggtgacgaggctccataccacaggcccatcgcggcatctacctggatcaattcataagccgcggacagcgttgcggcgacgcgtgaagtgtggacggcggtgccggtcgtcacggccgttcccagccacggctcaccgtcgtgccgacgggggttgtaacccaggtaaaagaactgcgccgggatccactcctgccgggaggtcccgacacggggagtcttgacccatgtcatgggcaagtcgtcgcgataggtgtcgaacgcacctccagccactcgttgcgcgaagccgaatgcgcccagatcgagaacttcgtcctcggtccgggcgaggagttcctgacgagtcgcccagcgccgttcgaagggactatggagaatcccggtacccgcgcagtagcgctcgacggcctccgcgtagaccttgatctctgcctcaaactcgttcagccccaccccaccgatgtggtagctacccggcttggggtcgggccggtcaagcagtgcgtgcatccccgtgagttccccaccgttcacccgcacgcgggggccgagcgcggggtgcagcgagtagccgacggaagtcaccagcccgcatagcgggctgtaggtgcgccgcctgagccgggctgcggtctcgacggggtcgctatcctggcgaagcttcatcgctcgccccctgccgccagccactcacggatgtcgtagtacaggtccggagcggtttcaacctgcgctggtgcatcaaaacgggacataggtaggacgtcgttgtaggcgatctccatcgtcggtatgtagaccgacaacactttgttgcgcgtcgtgttgaggccgttgcgggcgatgctgacagcctcatgcgcgacgtgcgcggccaagatcgcgcgcaccgacgctgccacggccggcgctccggcccttacgcggtcggcagcggccacccgcatccaggacaggtagctctgccgttcgcgcaggttcatcgcgacccgctgctcgaaggtccggtaggacgaggtcgcaccagggacgacgtagggacccacgtacaaggccggcccgtctacagctgcgtggagccacgacaggtgggcgcgtcgggcgaacaggtcaagggcgcgcagcatagccgggttgttctgcgccagcgctaccacaaggagtggctgcaggtccggcgccgaacccagcaacgccaacatctgggaggcctcctgctccatgtgcaactcgtcggccgactgctcaagccgcaggcctgcgaagagggtggctgatggctgcgtgtcgtcagcgaggacggtagcctgcagcccctctccctcgagaatctgctggatatcgccggcgaggagcgcgtcgtcgctgaatacccacaccgggcgcgtctctctacctccatccatcttgtcctcaacgttttcgaccagcgcaccgatcgatgctaggtgggccatcacgtcgtcaagggccgcgcgggtcaatccgggcacccgggacacgatctcgggcggctgcagtccttggctcaacaagtccaaggccggccacagggtcccggtggcgtcgtcgtcctccagcgttgtgctctcggcgttccagacgcctcgacggaactccaccctgtccatcgagtaaggcaccatcatgaggcccggtgaaatgtggttggtcactttggctcctgtacagcctaggcttggacgcccacggtcatggtgtgggtcgcggtttggaaaatcccgtcgaggttgagtgcctgattgagttcgtcctcgtagaagcttgaggactcgactgaggcaagaccgagccccgtgcagaccaagttgatctgttgtgcgatcgccccgacttcttgaagggcgaacctcaaacccctggctccgtacttccgcatcgccctccacggcgagatgacgaacaccaagtgcactccggccgcatccgattgctccacggccggctcgccggccatcgaattcctcacgccgcgacagccctcttcaccggtcacgggcaccagtcgatcgatgaccggcgagtagcggtagacgccgcgactcaagccggacacccgttgtgcggacatgaagatagacacgggatacagccctccaccagacgggacagcgcgtacattataccgcacgatatcaccgctcgaacgcgggacatccacgtgccccgtcacaccggcagcacctctcagaaacgcagctacgtcacgcaggtctagggattcgccggtgtagttccgtccgctgcgccggcgggcgatcacttgctcgaggggtgcgcgcaccctgctggacctgggaagttcgatcacatcggcagcgaacgtgtcgcgatccatctgtccgtacgtaacgatcatggggtcaacgaaatagtcgccgaccgagacgttgaactccatatccccccgggcgatgcgcgaggcgagcaagaagtctgcagctgcgttagacagccccggcccatcagtgttgtcgcagcggaactcgtgggtccgaaaccccacaccttccgtgcccgggctctgcgctcgatacgacgtgatcgcagaactagccttccttaaaccgcccggagtagctaccatgaccgtcccctctgaggtctcccgaacacttgcgacaatagcagcatgtgggggcagccgccagaggcgggcatccttgtctcgacaaccattgacctccggattcgatatgtgcataatcatagtcgtgccaacacgaaacgtgtacgtctcggaagacgacctagacctgttcgccgaagccaccgagatcgctggaggcctgtccgcagcggtgttggaggccttgcgcagctacgtagacaggcaccatcgcgcggccggcggattcgacgagatcgagctggagctgcagaacgacggtatcgaccaccgtgtcaccttcatgggtcgccgcctgatacacatccgccgtccagatcccgagggaacccgcatagacactgtctacttgaccgccaaacaccaattcgccgttgccaccaaaatccaacgacggctgccagactggacgaccggccacgagcacatctggtccgacccggagacctggaatcgggagttctggatcgcaggtgacaagacgatggccgtgtatcccagccttgacaaactccgcgaagctgaccccaatgtggccgaacgcgccgaggccacggtcaaaatcccgccgttcgaggtcctggacatctgatgacagaatcatcatcttcccggcggcaattggcaatgccggtgctgtcagtcacggatctagccaagaaatacgtggttcatggcggctacgaggtcccggcactcaacggtgtctcgtttgacctgcacccgggagagatgctgggtttgttcgggccaaacggtgctggaaagacgacgctggtcaggatcatcgcgggcctcttatcggcagattctggagacgtccactggggatcggatcaaggtcgggccaggttaggctacgtgtcccaaaagggtggactgcagtacgggctcacgtgccgggaagagatggtcttccacgcacaatgcttcggccagtccgccaagcaggcccggactagcgtcgacgaggtcgccgcgatgctgcactgcgattacctgatggagtgggacgtcggaaggctctccggtgggcaacgccgaatcatcgaggtagggctagcactcgtcaatcaaccatcggtcgtcctgctcgacgagcccaccctgggcctggaccccgcaacacgcctgtcgttgtggcaaacggtaaagtcggcacgccgtgagaccggtgctgccttcctcgtcaccacccactacattgacgaggtggccgagcacctgtccaacgtcagcgtgatcaaccacggaaccgtcgtcgccaacggctcgccagcgcacatccgagaaatgttcgcgaccggggaagtaacgctcggcgtggccgaggatacggtggacagtgcggtggacgtgttggctgggaccgcgttcgaggcgcaccccaccgaaaccgtcccggggatcgtggtcaggtccaggcatcccgacgtggacgcggccaagatcatcaccatcctggctggtcatggcatctcggtggactccatatccgtacgcgaggcgaccttggaagaggcgtttctcacgatcacaggcagtcgagacccggagaggcaaatcccatgaacacttgcttcaggcgatatgcggcgatgtcgctgagagcgcggcgtgatttggccctgacattcatccagcccctcgtctacctagccctcttcggaccgctcttcgtcacgacgatgaagatgtcgcagagagctaccgccgctacgggttactccctatacatcacgggcctgtccatccaaatggccatgacgatcggtgccttcgcggggctaaccatcatcctcgaataccgactcggcatcctcgaacggatctggagcacccccctcacggggagcaagatgatggcggggcgaatcgcgcgcgacgtcgttatgatgatgatgccgatactggtcgtcttcatcatcggcctggtgctgggaacacgccccagcccactgggcctggcgacctacttcgtgacagtgctcggcacaggagccacgttcgccggggtctcctacgcggtggcactcagaacgaagagcgaggcagcgctatccgcgatcttcaacctcatcctgctacccatcctcctgctgtcggggatcatgctgcccatgtcgttcgcaccacactggatcgccaccgctgcccacgtgaacccgttgtggtacctggtgcaaggcgcgcggaaccagttcagcgttctagggctcgtggcggcggccccatggagttgggctgtggccatcgtcatgtcagccgctgccttcggctgggcaagccacgaattcaacaagaggcgctgacacaaagaatggtgccgggaacccaggtccccggcaccaccgagtgcactcgcgacgtcaacgcaccgttgcggtcactgcgcaggtcgagcacgaggacgacgagcccgcgctgctgcaggtcgagccgccaggcgcgagcaggtcgacgttagcgtcggcgccgccgaagacggacgtgacggccggctgagaggtgcggatgcggtgctccagcgaggaggtggtggtgagtttcatgggaggtgctcctaggagtgagacgagaacaaaccctagcgataggttagcagtccgcaaccgactccgggaatagtagaagcgcgcatccgtagcggaagaccttagcctgattacagtgaccctgttcgcgtctcaacattattccacacccccgagcagcgaacgacaccgcgatgatgatccgtcgcctctccaccgaagaactccgcgcccacatcgcaccgggccgccgtcccgtgcatcagacctgccgtcaacgtcggccatgaagctgggaaggtggctctcgtctaggagcagacgcgggacgcctcctccaggttgggccggggaagtgtccggttcttgatgtaggtggcggtccctattgatgggcgttgaccgtgggaatgcggtcggcgaagggggtggcgaacccgttgagcgcaggcttccagcgcatgcatcaacgctgtctgccggccaccggcaagcctcacccgcccgtcatggccatcatcgaggtgccggtgaatcctcgacacatgatcccaactcccccggaggggcttccggggctgttcagccaccagatcagccaggcggcgagcccgactctgccacccggaccctgcagagcgtgcctgctgccgtcgtgtcgtgtcgggccagtgggccaccagatcggccacatccgtcttggcccatctccagcccgccagacccagggaggccatcacctcatcgacgccgcgccgggtggtctcatcaaccccgtcaaacagctcgggccacctcgatgatgccgtccgtgaacgatccagattcatgacatgctcctcttcacagatgccgacgacgatcaggccgtggccgtggcaacggggtgacctgccggcgcggctcacgacgttgagccggaaccacacgagacgcaccagtgtgctgcgccgtcttgagtcgggcgctgtactgggccctggcgctgtggtgaacagcccgacgaagcaccgaccgccggctgtcctcatcgccagggcgaggcatggggcgcggcatggtgcgcccggtagcagcatccatgagggtgatccggtcagccaaaatgccgagccggttttcccacttccggggccacggcaccagcaggtcacgctgacagcccacgccgtggcgtcggcagtccacaacattttctcacggccaggatgcgagtgcagcagctccaccggaacaccagcatcacgcacccgccgcatcgtgacctcatcctcacgtgccaccagcgggggagagcgactaccgctgcagccggtccaaagcgactcttcacagatgagggggtggatcggtagctgacccctaggtcctgatgtgggtcgaggtccttg

SEQ ID NO: 102 - DNA, 599 bp, Propionibacterium acnes; identical to SEQ ID NO: 100
  source 1..599: mol_type = genomic DNA

SEQ ID NO: 103 - DNA, 17061 bp, Propionibacterium acnes
  source 1..17061: mol_type = genomic DNA
gtgttccagtgcctcgcgggcgtgatgttcttcttcggcaccttcttgccacatgcttcgcgcttcagcctcgccatccaagcgaacctggactgtgaacgagtcctcatcgggtccgtcctcattccacgcggcaatgatcccacgggcctcgtctgcgacctgactcaacttcatcgcctgcccgacagccccgagagccggaatctcgaacacccagatattcgcctcagccgagacctcacgatgggcgatcacttcgtaggtcgtctcaccttctactgtcgtgtccattacttccactccttcggaattttcacgcctgctcgctccagctgtgccaggacaccaactgacgtcagctggtgtcctgctggtatcgatacgcgcccggctccgccggggcgtccccagatttcatggcttcccttggcgttccgcagacgggcccatccttgagaacggagcagcttgaggacgtccttagttttctgcggtttcacacatcatagtatagccccacttaacttgtaaactaagcccctgtttacattttagttggtgcatgtgatccctgctcttatgacgtcgcccgacctggcgccttagacatgcactgttcatcctcaaccacactcaccgtcacgggtccgaaggcgaggtctatcaccattcgcatcgatgaagttgaagcaggatcgtccgcatcacgcactgccgatccggacagacgccaccggccgtaccgactgtttacgatctgccaccgcagactgctgccataaccgctatcacctctgatagtacgtttagtactatcagaggtgattcaagattctcctgtcgagcagccctacagtcacgaagtcctgcgatcgtcatcgcttaaggcagacggatggccatcggggaccactcgcaaagcaggggcgatcagcaacagtgatgtgccatgagcaagtactggtgcaccggctgtttactccgcccctagataaaccacgggtgcaggggtggacaccacaccatgaccgatgtggtgcccaccccatggctcacaggcaggccctatcgccgggagcactgctgcagatgaggctcagtaacctgccatgtctcacctggggccaaggtgccaagctccccacggaatctcaggcatcggaaaccagcagccgaacttccacagcatgagcgccctacgaaaaagcaggccgccgacggttctcaagaactcgccggcggcctgcatcgccactcgaactgtaaccgtggtccgaccccgtgcacaggtaagctccacactcccaccaggcatggccgaggcagtaccaagttgccgtggcccatcggcagatttggttaaattttgaaaagtcatatagactccttctgtaaatttttaaatctcataggactctcgccatcgccagccagcttcgacaggagtcccgatgtttcaccgagtgaaatatcggcaccgtttgagttgacctaaagctcaaaagatgctagaatccatcttacctcgttaggggcgttttgtcaaacgcccctatattgcgtgtcttcgcgcgtcgtagcgctgatgctgcgcctgtgtcgactatccgtttgtaagtactttcgatgacaccagcagtggctactcatgactggtgcgtgcgggtctaaagcagcagggaaaggaatcgcagtagaagccgcttgattcctatcacccctgatggtactatcagtactaacagagcagggcttactcgatgcgtgagaatcggggacatgctgagcctctcgtaggtcattggcctgctgggcgtcagtgtggcgcggttcgatccagtgaactctatcagctctgttagtactgtcagagttgatatattcgaccccaggaggagcccatgagttacatcgttcgcaccggaaatttggtcgacacccccgagctgcgtgagggagagcatggcccgtacacctacgctcgcgtcatcgtgtccgatcgcattcgccaggaggacggcagctacgtcaacgggccagcgatcgcctacgacgtcttggcgggtggcagccaagccgtgaatctggttgaagccgccaaggcgagcggcaacatccgcatcatgttcgcgggccgttaccgcgtcaccgagtggcggggtgagcagggcactcgtatccagcatgaggtccgagccgacgaagtgagcgtgagcctgctcggtcagagggtgaccgtggagcggcctcgaggtgacgtggcatccaaggagagcacgtcgttctgattgagtccgggggcacggtggtcgccgtggtaaaccgtgcccctgacagtactattgacactattggaggtatcagtgtgactgctcaaattttcgccttgtgcaaccagaagggtggcgtcggaaagtcgacatcgacgtttcatctggcccgtgccgcggtgttgcgtggccagcgtgtgcttgtcgtcgacaacgacccccagggcaacctgacgtctgtcgcggccgccgagcccgtgggggaggatcaggcggggctggccgatgtgctcagcgcgcgtgctccagagaccctccgcgatgtgatcgtgccgggaatctggtctggcctcgatgtcgtgccgacgtctggcatcacgctcggctgggtgcgtgacgaactcgtgatcgccggtgccggccgagaaggccggctgcgggaggccctggccggcgtcgaggacgactacgacgtgatcctgatcgactgtgctccatcgctcgatcagctcacgatcaacggcctggtggccgcccagggtgtcatcgtcgtgacgcactcgaagttgtggagcgccaacggcctcgcccagctgctcgacaccatcgacagcgtgcgcagctactacaacggcgcgctgcgcgtggcgggcatcatcgtcaaccagcacgaggagaacaccatcagcgggaaaacctggctcgacgagctgcatcaggctgccgagtcccggaagctgaccgtgcttgacccgccgatccccaagcgtgtcgtcatcgccgataccgtcgaggccgcgcgcggtctcgacgagtggggaagtgccgaggcggccgcgctcggccagttgtacgcccaccacctgacctgcatcgaaggagccctgtgatgacccgtccagccccccgaaagtcctcattgagcggatcaactccggtcgccccgccggctcagacggcgccggcaccgtctgccgcacctaccccccacaaggccgatgagtcacagacgagcagcaccacgaggaagtggcggcacaaggtgtcgttctaccaggacccggccgacaccgaccgggtgcgcggggcgatcctttacacgatgacgaccgagggcaaccggaacctgagccagttcgtcaacgatgccgtcatggccaaggtggtcgagctggaagtcaagtacaacgatggccagccattccccgctgtgggagcccgaggactaccccagggcggtgcagccgccgccggtgagtagaggaccatcgaccgtcgggggcttcaccatgcccccgaccctcggtcatcctgatcctcttgtcgatggtggtgacagtgggggattcacgcctcgttcagatcagaggaagtctcaccgcgtgattagtactatcaaatctgacagtactaacagagcagatagggttccctaggtcgagctgtatcacgccgacaaccagtgagccagtgatctacgaggggcgcaatatgcacccgatcggtagccgcgaaggcctcgccctgccccgatagtactatcaccactatcaatggtgctagtggtgagtttcttccattgatgacaacagcacagtgctgccgtctgtgtgcgggccaccagcccgcacacagttgccgtcgaggacgttgttcatgctctgtggtggccggtcctgagggcggctcgcaggatctcccggcgctcacggcgacgagcctggtagccaaggtctgcatgttcggcggcgagacgggctttgagggttgcggcttctgcacggcggtggagttggtcgtcgatgagttgggcgcgggccagacgccgcttatgggggttgtcgtgggtgaggggggcgtcgaggctgccgtcgtgggttagggccagggctgctcgttcggcgtcgtcgaggccgatgtggtggacggtcacgggtgcggtggtgacgtcgaggatgtccaggtggatgttgtggccgccgccgggggcttcggggaagtctggtgggctggcctggccggtgtcggggtcataccaggacaggccgatgatctcggcccagggtgggggcgggcagacggctcgcagaagggtgtgggccaggaacgtgttgcgggccatgatgcctccaagggtgaaaagcagtcgagtagcgatgacggcggggtagccgtctgctgggctgaggccgaccgggcccatgtcctcgatgctcttgtgctgcggccataccccaaagctaccaaacagtctttttaatctcaaagatacaaacagtgcttgacatattatctgcagcgaaagatactttcatcatggtggctgatcatgattacgcgactcctgacgatgagtggatgacacctcctcaggtggcccgtgtgattccgaacaccactgctcaggctgtccggcgctgggctgaggagggtcagcttcctggggcgtttcgtactccttctgggcgttggcatattccgtggtcggctgtggtgggcatcatggggtttgatccgcgtgagtccgcatcaccgagtgatcgtcaccagagctgacagagtcgtcgatgagctttcgagtgcagagctgatggcacgacggtctggatacttgtggagatgagagacgaccacatccagtcatggtcggggtacaccgaggggcagattcagcagtgctggcacgatgaggttgcccctgccattgactcgctcatggagcaggtaaggtctgttgccgagactcctgtgccgccgggttcgagattttacggcgatgagcagtgggccaagccttttcatccgtctactgcgatctgcggttcaatgggtccgccagcgatcacttgcacgcgctgaagctcctcgtctgggaagcgaacgtccaccatgtctatgcgccgtacacccttgctcgtgcatctattgaggcatcgtctactgctgtgtggctgttgagcacgaagacgcgcggagaacgtgtgctgcgagccttgcgatggtacgcgcaggattgtcacgactcgtgcaggttcatggatgatgagcagtatcgtgaccacctattgcggcgcattgaggggactgtcgctgcgggaaatctcgactcgcgcgctgctaggaaacggtaccgtgcaaccgatgttgtcgatgaggctgatcagctggttcccggaactctgagggcgtggcgagctttttctggtatggcccattcccgtatgtgggcatccagggggctgctcgacatggaagtgctgtccagtggccaaggaatggttacggcgaaggtgacgagcggatcggcccaaatcctttgggccgtcgtggcagctctgaatgttgctctcagtgccgctcgcttgtggcgtgattcgatgtgctcaccgtttgctgttgcccagtcggtagacgcgatgccagaggcgtttcgccgccctgtttagggtctgatcggggtagtgggtgttcacggggtcccaggttggccatggggcggcttggtgatgtgagttgggttgtgtggcagcctgggtgttgggtgtggcttcgttggccacgaaggcatgctcttccttgtgctgggacttgagtccccagtgctctcccctttgctagtggggggtggggtccccggaggtaggtcctccggggactttttctatgtctgtccgtgccccaggatttcgtatctaggcagtaccaattttgggttagttggaggtttctttggtaatggacagggtgagggtgatgaagaggtggccgtccttggtggcagaaattttctcgaacttcagctgaatgttgttatcagccactatctgttgggcggtgaggtgctcggagagcttctggaatccttcgcggatccacaggttgtaggggttggtgaccgagaccgaagggtatgggtcgaccttcagcgtcaggactggctggtctgggttgagggagttgatcttcaccagtttggggtaccggtcgcactcatgtgtctcttgtgttgggggccagcagtcgggggcccattcctcccagtggtcacgcatctcacgaagtactttcctgcatctcagcctctgcaggagctcgcgcgccaccgatgggagggctgccatgatgagggcaaggactgcgaacccgatgatgtaattgaccgtgtccctcgtcacgccgttcttgccgaggattccgatggcgaacgcgatgacgacaccgcccaggcacaggtgcatggggtcatgctgtgatggtttttcttcttcagcgactggtggggctatagtcatgtgtgccccttagtactaagtgatactggtgggttgcttttccccggtggccgtgtgcaagacggccaccggggttttccttcatgttcctgattttatctgcccggtgtggcgttttcatctttgtgtgggtggttcgcctggggtcttggagtgtggtgacgcggtgatggtcacggtgacggtgactgtggcgcgtggcgggtgaggtggttctttcctggtctggtgtgtggcccaggtgagtgtggtgatgagggccagggtgaggatgatgaccagggtggggagtagtttgtctggccggtgtcgccgggcttggtggcgcggcatgtttttccagggtgtgtctccgaacaggtcgtcgtcggaggggtcgtcgtggttcatagggtggccttggcgatggtggtgggcgagtttggtccaggtgatggtgccgtcggaggcgatgtggcggtcggcgggcagggtgtggacggtccatccggcgtcggtgagggcggtggtgaaggatttcttgatggatcgtttgggtaggtcgatgggggcgtgggtgccgacccagatgcaccggtttttgaggtgggtggcgccgaggtggttcatgtcgcggaccatgttttgggtgagtgtgagggtgtcggggtcccattggacggggatgatgatgtggtctgcgatggtgatggcgtgttgccaggcggcgtcgaggtcgttgtttccggtgtcgaggatgatgacgtggaagcggcttcttagggcggtgatgatgcggtcgaggtcgtcggcggtggggggtgtgatgaggctgttgtggttgtcggtgatggtgggtaggcatgtgatggtggcccagccttctggttgccaggagatgtaggggccgaggtcgcggggttgggaggcgaatcctgggtgacgggctgcgcgggcgaggtcgatgacggtgttgtcggtgtggcggggtgcgcgggtggagagggtgccgcgtgggttgatttccacgacgacgatgtcgtcgtgtcctgctgtggtggcgagggcttgggcaaggatgacggccagcggggttttgccggtgccgcctttgaggttggcgagggtgatgatgtggtcggtgagttgggcgggtgcggcggtgtggtgagggttggcggtgaggttggcgatggtgaacagggcatcgagatcgtcggtggtgttctgctcggtgggttgggggtcgccggagatgatcgggtcggcgcggcgcggctgccatgccggcctcaccactgtcacgaccaccacgggtctgctggcgctgtgtgggtgtcgtcggcgatgactcacgatcggcagtctcaccatcgtctcggtgatgctcggctagcgctggacccggtcaagttcgggccggctcacccagtggtgatgactcggtcacagaaccgctgccggtcgttatctcggacgtctcgactcctccagtcctgatgggcgttggagccacctacacctactctcagaacgaccccgacctcgtgtggggcgggggcagatgtcacttgggccaatcgagagcccaggtgatggggaaagcaggggtgtgatatctgtcctggaaaactgggcagctgctaccgtggattgacggatctccacgaaagaagggaatgcgaccatgcagatcaccgtcaagaccatcaaagatcatcgggttcgcactgtccagaccgccatgagcagcgccttggggattggttcccaggtagacatgctcgcccccggcggttccaccagctcgagttccggttcatgctgctcgtgctcgacctgcgcggtagtggcgcagcctcaagactgaacggctggtcagccccaggggcgtggcgctcatcgcgtcacgccccttctattcgctggacagggtgcgcgagctgaggaacatcgcggtgtgtgcgatgacgaggggcaggagcaagtctgtgcgggttgccaagtagccctgcgcgatggccatcacgctggccccgacggcggcgaagacacctccgatacgtcgcttcatgccgccgaattgcatcaggacgaataggactcccgcggtccacatccctccgggcatgcatctgggaaagatgaaccggaagatgatctcttcacaggagagctggagtactagcagcgtagcccccacggggagactcacctctactgacagacggatcgtcttcatccacccacccgagctggcatcgaccatttcggtggccatgcgcgaccggtggcctcgtgcctctcgctgcgtgtcgatccagccgagcagtccgtggacgctctccgctaggactcctgacgcgacagtctcaccaattcctaagcccacggcgaggaccgcgacgcccccctgcacggcaggctgtgtgacttggtggtcccaccaacccgccggcaggaccatgcgtgcgaggctgcacacgagcaggaggtggagggtcacgacgagcgacatctggaataccgcttgccgttcggcgatggtggcgttgggaaagagcggtaggccggcacgggcagcggcgctcgacagcttccgcaagagcggtttggagacgaagtagtaggcgacgtacagcgccagcgctgtcgcgatgatgatcatcggtctgccaccgagctgacccgccgatagccgtttctgttccaccaatactggctgttgtagatcaggtggcccagaacacaggcccagatcccccagaagatgaacaggatagtccccaaggcggcgagcgggatcttggagaggacctgtccccgtccgaacaccgagtggccgcaagcaaacaagagtgctcccacagcggtgagcgcgagccaggccggggttgctcgcagactgatcaccgggaccccgacccggaagccgacctcttctcctacagcgatgactagcaactgccacagcggcatgttctgaacggagcgcgcgactcgggctcgagtcacccacacgggctgttgagcgctcacatcaccactcaggtaccccggtgaggcacttcgcttagtactggggcccgatgtgcgagcattcgtgatgtgtcgcaggatccggttgtcaagccaagaggccagcagggctccggcgacagtgacgggtagcccgatcagcacgaggccccagccatgcggtgccgagaggtttctggccggcgtgcacgcgaggcaggcaaatgccatcactgccagcactacgacgtagatggtcgcataattcgacttgcgggtgacgttgccgaccatcttggccaaagtcgctggggaccagctgatgagtgcgatggtggtcagcaggaagcaggaccagacagacatccggcgcactcaggggtatgggtgcggctgtgggttttggaaaccgccatatgcggcgtagcgggggtgtgcccgcatgggtgcgctgggcagtgacagggcgagcagcccaggcgcccagagcctgacacagtgcagtcccagcccctggatctctatggtggtgaaatcttcgatgtacaggggtgacacacaggtgatgctgttgaccacgctctttaccagttccgcccccgtgtgggtgtcgtcaggtggcaggtcttcggcttgggcaatggtgcccgcgtcgaatttcgccacaactgattgcgcggcctgatagttcctcgcgtagtaggagacgttcgagtcgaggtcaagcatgtcctccgtggacatactggacgcgtcggcctcggcgtcgaaagacgtccataccgcgagcatccgaaccccgctgcactcgagaaacgccttgtacatggctgcttccagacccgcgtctgcacctaggccgacggcgacgaggggaagttggttgccactaccgaccatcatgcatgccacggtgaaatgcttgagcccgggagtcggaagccagtagaaacgcagttcgtggcttcggcccgctgcacgttccacgagccgctggatgcgctggaggcggggtccttcgacgcggatgcgcacaggtgacgaggctccataccacaggcccatcgcggcatctacctggatcaattcataagccgcggacagcgttgcggcgacgcgtgaagtgtggacggcggtgccggtcgtcacggccgttcccagccacggctcaccgtcgtgccgacgggggttgtaacccaggtaaaagaactgcgccgggatccactcctgccgggaggtcccgacacggggagtcttgacccatgtcatgggcaagtcgtcgcgataggtgtcgaacgcacctccagccactcgttgcgcgaagccgaatgcgcccagatcgagaacttcgtcctcggtccgggcgaggagttcctgacgagtcgcccagcgccgttcgaagggactatggagaatcccggtacccgcgcagtagcgctcgacggcctccgcgtagaccttgatctctgcctcaaactcgttcagccccaccccaccgatgtggtagctacccggcttggggtcgggccggtcaagcagtgcgtgcatccccgtgagttccccaccgttcacccgcacgcgggggccgagcgcggggtgcagcgagtagccgacggaagtcaccagcccgcatagcgggctgtaggtgcgccgcctgagccgggctgcggtctcgacggggtcgctatcctggcgaagcttcatcgctcgccccctgccgccagccactcacggatgtcgtagtacaggtccggagcggtttcaacctgcgctggtgcatcaaaacgggacataggtaggacgtcgttgtaggcgatctccatcgtcggtatgtagaccgacaacactttgttgcgcgtcgtgttgaggccgttgcgggcgatgctgacagcctcatgcgcgacgtgcgcggccaagatcgcgcgcaccgacgctgccacggccggcgctccggcccttacgcggtcggcagcggccacccgcatccaggacaggtagctctgccgttcgcgcaggttcatcgcgacccgctgctcgaaggtccggtaggacgaggtcgcaccagggacgacgtagggacccacgtacaaggccggcccgtctacagctgcgtggagccacgacaggtgggcgcgtcgggcgaacaggtcaagggcgcgcagcatagccgggttgttctgcgccagcgctaccacaaggagtggctgcaggtccggcgccgaacccagcaacgccaacatctgggaggcctcctgctccatgtgcaactcgtcggccgactgctcaagccgcaggcctgcgaagagggtggctgatggctgcgtgtcgtcagcgaggacggtagcctgcagcccctctccctcgagaatctgctggatatcgccggcgaggagcgcgtcgtcgctgaatacccacaccgggcgcgtctctctacctccatccatcttgtcctcaacgttttcgaccagcgcaccgatcgatgctaggtgggccatcacgtcgtcaagggccgcgcgggtcaatccgggcacccgggacacgatctcgggcggctgcagtccttggctcaacaagtccaaggccggccacagggtcccggtggcgtcgtcgtcctccagcgttgtgctctcggcgttccagacgcctcgacggaactccaccctgtccatcgagtaaggcaccatcatgaggcccggtgaaatgtggttggtcactttggctcctgtacagcctaggcttggacgcccacggtcatggtgtgggtcgcggtttggaaaatcccgtcgaggttgagtgcctgattgagttcgtcctcgtagaagcttgaggactcgactgaggcaagaccgagccccgtgcagaccaagttgatctgttgtgcgatcgccccgacttcttgaagggcgaacctcaaacccctggctccgtacttccgcatcgccctccacggcgagatgacgaacaccaagtgcactccggccgcatccgattgctccacggccggctcgccggccatcgaattcctcacgccgcgacagccctcttcaccggtcacgggcaccagtcgatcgatgaccggcgagtagcggtagacgccgcgactcaagccggacacccgttgtgcggacatgaagatagacacgggatacagccctccaccagacgggacagcgcgtacattataccgcacgatatcaccgctcgaacgtgggacatccacgtgccccgtcacaccggcagcacctctcagaaacgcagctacgtcacgcaggtctagggattcgccggtgtagttccgtccgctgcgccggcgggcgatcacttgctcgaggggtgcgcgcaccctgctggacctgggaagttcgatcacatcggcagcgaacgtgtcgcgatccatctgtccgtacgtaacgatcatggggtcaacgaaatagtcgccgaccgagacgttgaactccatatccccccgggcgatgcgcgaggcgagcaagaagtctgcagctgcgttagacagccccggcccatcagtgttgtcgcagcggaactcgtgggtccgaaaccccacaccttccgtgcccgggctctgcgctcgatacgacgtgatcgcagaactagccttccttaaaccgcccggagtagctaccatgaccgtcccctctgaggtctcccgaacacttgcgacaatagcagcatgtgggggcagccgccagaggcgggcatccttgtctcgacaaccattgacctccggattcgatatgtgcataatcatagtcgtgccaacacgaaacgtgtacgtctcggaagacgacctagacctgttcgccgaagccaccgagatcgctggaggcctgtccgcagcggtgttggaggccttgcgcagctacgtagacaggcaccatcgcgcggccggcggattcgacgagatcgagctggagctgcagaacgacggtatcgaccaccgtgtcaccttcatgggtcgccgcctgatacacatccgccgtccagatcccgagggaacccgcatagacactgtctacttgaccgccaaacaccaattcgccgttgccaccaaaatccaacgacggctgccagactggacggccggccacgagcacatctggtccgacccggagacctggaatcgggagttctggatcgcaggtgacaagacgatggccgtgtatcccagccttgacaaactccgcgaagctgaccccaatgtggccgaacgcgccgaggccgcggtcaaaatcccgccgttcgaggtcctggacatctgatgacagaatcatcatcttcccggcggcaattggcaatgccggtgctgtcagtcacggatctagccaagaaatacgtggttcatggcggctacgaggtcccggcactcaacggtgtctcgtttgacctgcacccgggagagatgctgggtttgttcgggccaaacggtgctggaaagacgacgctggtcaggatcatcgcgggcctcttatcggcagattctggagacgtccactggggatcggatcaaggtcgggccaggttaggctacgtgtcccaaaagggtggactgcagtacgggctcacgtgccgggaagagatggtcttccacgcacaatgcttcggccagtccgccaagcaggcccggactagcgtcgacgaggtcgccgcgatgctgcactgcgattacctgatggagtgggacgtcggaaggctctccggtgggcaacgccgaatcatcgaggtagggctagcactcgtcaatcaaccatcggtcgtcctgctcgacgagcccaccctgggcctggaccccgcaacacgcctgtcgttgtggcaaacggtaaagtcggcacgccgtgagaccggtgctgccttcctcgtcaccacccactacattgacgaggtggccgagcacctgtccaacgtcagcgtgatcaaccacggaaccgtcgtcgccaacggctcgccagcgcacatccgagaaatgttcgcgaccggggaagtaacgctcggcgtggccgaggatacggtggacagtgcggtggacgtgttggctgggaccgcgttcgaggcgcaccccaccgaaaccgtcccggggatcgtggtcaggtccaggcatcccgacgtggacgcggccaagatcatcaccatcctggctggtcatggcatctcggtggactccatatccgtacgcgaggcgaccttggaagaggcgtttctcacgatcacaggcagtcgagacccggagaggcaaatcccatgaacacttgcttcaggcgatatgcggcgatgtcgctgagagcgcggcgtgatttggccctgacattcatccagcccctcgtctacctagccctcttcggaccgctcttcgtcacgacgatgaagatgtcgcagagagctaccgccgctacgggttactccctatacatcacgggcctgtccatccaaatggccatgacgatcggtgccttcgcggggctaaccatcatcctcgaataccgactcggcatcctcgaacggatctggagcacccccctcacggggagcaagatgatggcggggcgaatcgcgcgcgacgtcgttatgatgatgatgccgatactggtcgtcttcatcatcggcctggtgctgggaacacgccccagcccactgggcctggcgacctacttcgtgacagtgctcggcacaggagccacgttcgccggggtctcctacgcggtggcactcagaacgaagagcgaggcagcgctatccgcgatcttcaacctcatcctgctacccatcctcctgctgtcggggatcatgctgcccatgtcgttcgcaccacactggatcgccaccgctgcccacgtgaacccgttgtggtacctggtgcaaggcgcgcggaaccagttcagcgttctagggctcgtggcggcggccccatggagttgggctgtggccatcgtcatgtcagccgctgccttcggctgggcaagccacgaattcaacaagaggcgctgacacaaagaatggtgccgggaacccaggtccccggcaccaccgagtgcactcgcgacgtcaacgcaccgttgcggtcactgcgcaggtcgagcacgaggacgacgagcccgcgctgctgcaggtcgagccgccaggcgcgagcaggtcgacgttagcgtcggcgccgccgaagacggacgtgacggccggctgagaggtgcggatgcggtgctccagcgaggaggtggtggtgagtttcatgggaggtgctcctaggagtgagacgagaacaaaccctagcgataggttagcagtccgcaaccgactccgggaatagtagaagcgcgcatccgtagcggaagaccttagcctgattacagtgaccctgttcgcgtctcaacattattccacacccccgagcagcgaacgacaccgcgatgatgatccgtcgcctctccaccgaagaactccgcgcccacatcgcaccgggccgccgtcccgtgcatcagacctgccgtcaacgtcggccatgaagctgggaaggtggctctcgtctaggagcagacgcgggacgcctcctccaggttgggccggggaagtgtccggttcttgatgtaggtggcggtccctattgatgggcgttgaccgtgggaatgcggtcggcgaagggggtggcgaacccgttgagcgcaggcttccagcgcatgcatcaacgctgtctgccggccaccggcaagcctcacccgcccgtcatggccatcatcgaggtgccggtgaatcctcgacacatgatcccaactcccccggaggggcttccggggctgttcagccaccagatcagccaggcggcgagcccgactctgccacccggaccctgcagagcgtgcctgctgccgtcgtgtcgtgtcgggccagtgggccaccagatcggccacatccgtcttggcccatctccagcccgccagacccagggaggccatcacctcatcgacgccgcgccgggtggtctcatcaaccccgtcaaacagctcgggccacctcgatgatgccgtccgtgaacgatccagattcatgacatgctcctcttcacagatgccgacgacgatcaggccgtggccgtggcaacggggtgacctgccggcgcggctcacgacgttgagccggaaccacacgagacgcaccagtgtgctgcgccgtcttgagtcgggcgctgtactgggccctggcgctgtggtgaacagcccgacgaagcaccgaccgccggctgtcctcatcgccagggcgaggcatggggcgcggcatggtgcgcccggtagcagcatccatgagggtgatccggtcagccaaaatgccgagccggttttcccacttccggggccacggcaccagcaggtcacgctgacagcccacgccgtggcgtcggcagtccacaacattttctcacggccaggatgcgagtgcagcagctccaccggaacaccagcatcacgcacccgccgcatcgtgacctcatcctcacg

SEQ ID NO: 104 - DNA, 1527 bp, Propionibacterium acnes
  source 1..1527: mol_type = genomic DNA
accagatcggccacatccgtcttggcccatctccagcccgccagacccagggaggccatcacctcatcgacgccgcgccgggtggtctcatcaaccccgtcaaacagctcgggccacctcgatgatgccgtccgtgaacgatccagattcatgacatgctcctcttcacagatgccgacgacgatcaggccgtggccgtggcaacggggtgacctgccggcgcggctcacgacgttgagccggaaccacacgagacgcaccagtgtgctgcgccgtcttgagtcgggcgctgtactgggccctggcgctgtggtgaacagcccgacgaagcaccgaccgccggctgtcctcatcgccagggcgaggcatggggcgcggcatggtgcgcccggtagcagcatccatgagggtgatccggtcagccaaaatgccgagccggttttcccacttccggggccacggcaccagcaggtcacgctgacagcccacgccgtggcgtcggcagtccacaacattttctcacggccaggatgcgagtgcagcagctccaccggaacaccagcatcacgcacccgccgcatcgtgacctcatcctcacgctgccgatcaccgtcaaccagatggtcagccacgatggtgttcacaccccatgactcatgcagttgcctggccaaggcgcccaacacctgctgacgcacctgtgacttgacgtcatcatcctccagatcctgtgtaccaaccatcacggaggccaacacatcactgcgttgctgaaccagggtgttgacgacgtcgacatcgtcgatacccatgggattgttggcgcgcgcggccacggcatgaaacgtgttggactgcaaattctcgaccagaccacgccgatagtcgttgaactgggaggtgtcggcaatgacaccggtcatgatgtaggccgacccctcggacaaggccctgtaggactcgtcgacgaacgccaccaaccccggccgccgccggtaaagtcgacctgcttcctcgtcagccagcaaccatgacagtttttgccccatatgtcctccttgctgacatgacctcgaacatggtaaactttccgtaggaaaaacggggcaagtactttcgagcggctacctcggcccccggtgggctgtccagccttgtgcggaccgaagccgggggattccttatgtttgcggcaatgatgccgctgcaccccctcatgccgtggtgtggtcctttccccgtgtgcggtgtggtgcgtcgttgactggtttgtggccccgagccttactctgaccggtaggagaacggtgtggggtctacggatagcccactcggctcccggtggaatgtccaacagggtagggttgatgagttggtccatcaggaccgtcccggtggctgcgtcaatgatcgatatttcgatgatgcgcccgtccaggtcggtggtttcggtgtcgaggatgactccgactccgggttctaggagttggggatccaatgggtggtcatcgtgtggctcctacaggg

SEQ ID NO: 105 - DNA, 17061 bp, Propionibacterium acnes; identical to SEQ ID NO: 103
  source 1..17061: mol_type = genomic DNA

SEQ ID NO: 106 - DNA, 2003 bp, Propionibacterium acnes
  source 1..2003: mol_type = genomic DNA
accagatcggccacatccgtcttggcccatctccagcccgccagacccagggaggccatcacctcatcgacgccgcgccgggtggtctcatcaaccccgtcaaacagctcgggccacctcgatgatgccgtccgtgaacgatccagattcatgacatgctcctcttcacagatgccgacgacgatcaggccgtggccgtggcaacggggtgacctgccggcgcggctcacgacgttgagccggaaccacacgagacgcaccagtgtgctgcgccgtcttgagtcgggcgctgtactgggccctggcgctgtggtgaacagcccgacgaagcaccgaccgccggctgtcctcatcgccagggcgaggcatggggcgcggcatggtgcgcccggtagcagcatccatgagggtgatccggtcagccaaaatgccgagccggttttcccacttccggggccacggcaccagcaggtcacgctgacagcccacgccgtggcgtcggcagtccacaacattttctcacggccaggatgcgagtgcagcagctccaccggaacaccagcatcacgcacccgccgcatcgtgacctcatcctcacgctgccgatcaccgtcaaccagatggtcagccacgatggtgttcacaccccatgactcatgcagttgcctggccaaggcgcccaacacctgctgacgcacctgtgacttgacgtcatcatcctccagatcctgtgtaccaaccatcacggaggccaacacatcactgcgttgctgaaccagggtgttgacgacgtcgacatcgtcgatacccatgggattgttggcgcgcgcggccacggcatgaaacgtgttggactgcaaattctcgaccagaccacgccgatagtcgttgaactgggaggtgtcggcaatgacaccggtcatgatgtaggccgacccctcggacaaggccctgtaggactcgtcgacgaacgccaccaaccccggccgccgccggtaaagtcgacctgcttcctcgtcagccagcaaccatgacagtttttgccccatatgtcctccttgctgacatgacctcgaacatggtaaactttccgtaggaaaaacggggcaagtactttcgagcggctacctcggcccccggtgggctgtccagccttgtgcggaccgaagccgggggattccttatgtttgcggcaatgatgccgctgcaccccctcatgccgtggtgtggtcctttccccgtgtgcggtgtggtgcgtcgttgactggtttgtggccccgagccttactctgaccggtaggagaacggtgtggggtctacggatagcccactcggctcccggtggaatgtccaacagggtagggttgatgagttggtccatcaggaccgtcccggtggctgcgtcaatgatcgatatttcgatgatgcgcccgtccaggtcggtggtttcggtgtcgaggatgactccgactccgggttctaggagttggggatccaatgggtggtcatcgtgtggctcctacagggagtgtctgggctggacagcggtgcaatacccgcgccatagcggttttttctgcgggggtgacccacagctggtatttcgttttgacggcgatttggcgggccacgtagtcgcatctgtaggccttgttagggggtagccaggtcgctgcatccctgtctcgtttggcctcattagcgggtccgtcgacagccagcaagttcaacgggtcgttggccagggcggtgcgttgcagcggtgagagtttttgcgcgccggtaatccacgcgttcccgagggctacgacgtggtcgatttggactgttgtcgaggtgtgccggccgcgccgccaggcgagtgtggacccggtgtaggggtcgtggagtcgcccggagacgaccacgcatcgtgatccgggtttcaggtgggcctcgaccaggtcgcgggcaagggcatcgttgcgggtgtcgcatccgttgtggccccaggggcgggtcaa

SEQ ID NO: 107 - DNA, 17045 bp, Propionibacterium acnes
  source 1..17045: mol_type = genomic DNA
gtgttccagtgcctcgcgggcgtgatgttcttcttcggcaccttcttgccacatgcttcgcgcttcagcctcgccatccaagcgaacctggactgtgaacgagtcctcatcgggtccgtcctcattccacgcggcaatgatcccacgggcctcgtctgcgacctgactcaacttcatcgcctgcccgacagccccgagagccggaatctcgaacacccagatattcgcctcagccgagacctcacgatgggcgatcacttcgtaggtcgtctcaccttctactgtcgtgtccattacttccactccttcggaattttcacgcctgctcgctccagctgtgccaggacaccaactgacgtcagctggtgtcctgctggtatcgatacgcgcccggctccgccggggcgtccccagatttcatggcttcccttggcgttccgcagacgggcccatccttgagaacggagcagcttgaggacgtccttagttttctgcggtttcacacatcatagtatagccccacttaacttgtaaactaagcccctgtttacattttagttggtgcatgtgatccctgctcttatgacgtcgcccgacctggcgccttagacatgcactgttcatcctcaaccacactcaccgtcacgggtccgaaggcgaggtctatcaccattcgcatcgatgaagttgaagcaggatcgtccgcatcacgcactgccgatccggacagacgccaccggccgtaccgactgtttacgatctgccaccgcagactgctgccataaccgctatcacctctgatagtacttttagtactatcagaggtgattcaagattctcctgtcgagcagccctacagtcacgaagtcctgcgatcgtcatcgcttaaggcagacggatggccatcggggaccactcgcaaagcaggggcgatcagcaacagtgatgtgccatgagcaagtactggtgcaccggctgtttactccgcccctagataaaccacgggtgcaggggtggacaccacaccatgaccgatgtggtgcccaccccatggctcacaggcaggccctatcgccgggagcactgctgcagatgaggctcagtaacctgccatgtctcacctggggccaaggtgccaagctccccacggaatctcaggcatcggaaaccagcagccgaacttccacagcatgagcgccctacgaaaaagcaggccgccgacggttctcaagaactcgccggcggcctgcatcgccactcgaactgtaaccgtggtccgaccccgtgcacaggtaagctccacactcccaccaggcatggccgaggcagtaccaagttgccgtggcccatcggcagatttggttaaattttgaaaagtcatatagactccttctgtaaatttttaaatctcataggactctcgccatcgccagccagcttcgacaggagtcccgatgtttcaccgagtgaaatatcggcaccgtttgagttgacctaaagctcaaaagatgctagaatccatcttacctcgttaggggcgttttgtcaaacgcccctatattgcgtgtcttcgcgcgtcgtagcgctgatgctgcgcctgtgtcgactatccgtttgtaagtacttcgatgacaccagcagtggctactcatgactggtgcgtgcgggtctaaagcagcagggaaaggaatcgcagtagaagccgcttgattcctatcacccctgatggtactatcagtactaacagagcagggcttactcgatgcgtgagaatcggggacatgctgagcctctcgtaggtcattggcctgctgggcgtcagtgtggcgcggttcgatccagtgaactctatcagctctgttagtactgtcagagttgatatattcgaccccaggaggagcccatgagttacatcgttcgcaccggaaatttggtcgacacccccgagctgcgtgagggagagcatggcccgtacacctacgctcgcgtcatcgtgtccgatcgcattcgccaggaggacggcagctacgtcaacgggccagcgatcgcctacgacgtcttggcgggtggcagccaagccgtgaatctggttgaagccgccaaggcgagcggcaacatccgcatcatgttcgcgggccgttaccgcgtcaccgagtggcggggtgagcagggcactcgtatccagcatgaggtccgagccgacgaagtgagcgtgagcctgctcggtcagagggtgaccgtggagcggcctcgaggtgacgtggcatccaaggagagcacgtcgttctgattgagtccgggggcacggtggtcgccgtggtaaaccgtgcccctgacagtactattgacactattggaggtatcagtgtgactgctcaaattttcgccttgtgcaaccagaagggtggcgtcggaaagtcgacatcgacgtttcatctggcccgtgccgcggtgttgcgtggccagcgtgtgcttgtcgtcgacaacgacccccagggcaacctgacgtctgtcgcggccgccgagcccgtgggggaggatcaggcggggctggccgatgtgctcagcgcgcgtgctccagagaccctccgcgatgtgatcgtgccgggaatctggtctggcctcgatgtcgtgccgacgtctggcatcacgctcggctgggtgcgtgacgaactcgtgatcgccggtgccggccgagaaggccggctgcgggaggccctggccggcgtcgaggacgactacgacgtgatcctgatcgactgtgctccatcgctcgatcagctcacgatcaacggcctggtggccgcccagggtgtcatcgtcgtgacgcactcgaagttgtggagcgccaacggcctcgcccagctgctcgacaccatcgacagcgtgcgcagctactacaacggcgcgctgcgcgtggcgggcatcatcgtcaaccagcacgaggagaacaccatcagcgggaaaacctggctcgacgagctgcatcaggctgccgagtcccggaagctgaccgtgcttgacccgccgatccccaagcgtgtcgtcatcgccgataccgtcgaggccgcgcgcggtctcgacgagtggggaagtgccgaggcggccgcgctcggccagttgtacgcccaccacctgacctgcatcgaaggagccctgtgatgacccgtccagccccccgaaagtcctcattgagcggatcaactccggtcgccccgccggctcagacggcgccggcaccgtctgccgcacctaccccccacaaggccgatgagtcacagacgagcagcaccacgaggaagtggcggcacaaggtgtcgttctaccaggacccggccgacaccgaccgggtgcgcggggcgatcctttacacgatgacgaccgagggcaaccggaacctgagccagttcgtcaacgatgccgtcatggccaaggtggtcgagctggaagtcaagtacaacgatggccagccattccccgctgtgggagcccgaggactaccccagggcggtgcagccgccgccggtgagtagaggaccatcgaccgtcgggggcttcaccatgcccccgaccctcggtcatcctgatcctcttgtcgatggtggtgacagtgggggattcacgcctcgttcagatcagaggaagtctcaccgcgtgattagtactatcaaatctgacagtactaacagagcagatagggttccctaggtcgagctgtatcacgccgacaaccagtgagccagtgatctacgggggggcgcaatatgcacccgatcggtagccgcgaaggcctcgccctgccccgatagtactatcaccactatcaatggtgctagtggtgagtttcttccattgatgacaacagcacagtgctgccgtctgtgtgcgggccaccagcccgcacacagttgccgtcgaggacgttgttcatgctctgtggtggccggtcctgagggcggctcgcaggatctcccggcgctcacggcgacgagcctggtagccaaggtctgcatgttcggcggcgagacgggctttgagggttgcggcttctgcacggcggtggagttggtcgtcgatgagttgggcgcgggccagacgccgcttatgggggttgtcgtgggtgagggggggcgtcgaggctgccgtcgtgggttagggccagggctgctcgttcggcgtcgtcgaggccgatgtggtggacggtcacgggtgcggtggtgacgtcgaggatgtccaggtggatgttgtggccgccgccgggggcttcggggaagtctggtgggctggcctggccggtgtcggggtcataccaggacaggccgatgatctcggcccagggtgggggcgggcagacggctcgcagaagggtgtgggccaggaacgtgttgcgggccatgatgcctccaagggtgaaaagcagtcgagtagcgatgacggcggggtagccgtctgctgggctgaggccgaccgggcccatgtcctcgatgctcttgtgctgcggccataccccaaagctaccaaacagtctttttaatctcaaagatacaaacagtgcttgacatattatctgcagcgaaagatactttcatcatggtggctgatcatgattacgcgactcctgacgatgagtggatgacacctcctcaggtggcccgtgtgattccgaacaccactgctcaggctgtccggcgctgggctgaggagggtcagcttcctggggcgtttcgtactccttctgggcgttggcatattccgtggtcggctgtggtgggcatcatggggtttgatccgcgtgagtccgcatcaccgagtgatcgtcaccagagctgacagagtcgtcgatgagctttcgagtgcagagctgatggcacgacggtctggatacttgtggagatgagagacgactacatccagtcatggtcggggtacaccgaggggcagattcagcagtgctggcacgatgaggttgcccctgccattgactcgctcatggagcaggtaaggtctgttgccgagactcctgtgccgccgggttcgagattttacggcgatgagcagtgggccaagccttttcatccgtctactgcgatctgcggttcaatgggtccgccagcgatcacttgcacgcgctgaagctcctcgtctgggaagcgaacgtccaccatgtctatgcgccgtacacccttgctcgtgcatctattgaggcatcgtctactgctgtgtggctgttgagcacgaagacgcgcggagaacgtgtgctgcgagccttgcgatggtacgcgcaggattgtcacgactcgtgcaggttcatggatgatgagcagtatcgtgaccacctattgcggcgcattgaggggactgtcgctgcgggaaatctcgactcgcgcgctgctaggaaacggtaccgtgcaaccgatgttgtcgatgaggctgatcagctggttcccggaactctgagggcgtggcgagctttttctggtatggcccattcccgtatgtgggcatccagggggctgctcgacatggaagtgctgtccagtggccaaggaatggttacggcgaaggtgacgagcggatcggcccaaatcctttgggccgtcgtggcagctctgaatgttgctctcagtgccgctcgcttgtggcgtgattcgatgtgctcaccgtttgctgttgcccagtcggtagacgcgatgccagaggcgtttcgccgccctgtttagggtctgatcggggtagtgggtgttcacggggtcccaggttggccatggggcggcttggtgatgtgagttgggttgtgtggcagcctgggtgttgggtgtggcttcgttggccacgaaggcatgctcttccttgtgctgggacttgagtccccagtgctctcccctttgctagtggggggtggggtccccggaggtaggtcctccggggactttttctatgtctgtccgtgccccaggatttcgtatctaggcagtaccaattttgggttagttggaggtttctttggtaatggacagggtgagggtgatgaagaggtggccgtccttggtggcagaaattttctcgaacttcagctgaatgttgttatcagccactatctgttgggcggtgaggtgctcggagagcttctggaatccttcgcggatccacaggttgtaggggttggtgaccgagaccgaagggtatgggtcgaccttcagcgtcaggactggctggtctgggttgagggagttgatcttcaccagtttggggtaccggtcgcactcatgtgtctcttgtgttgggggccagcagtcgggggcccattcctcccagtggtcacgcatctcacgaagtactttcctgcatctcagcctctgcaggagctcgcgcgccaccgatgggagggctgccatgatgagggcaaggactgcgaacccgatgatgtaattgaccgtgtccctcgtcacgccgttcttgccgaggattccgatggcgaacgcgatgacgacaccgcccaggcacaggtgcatggggtcatgctgtgatggtttttcttcttcagcgactggtggggctatagtcatgtgtgccccttagtactaagtgatactggtgggttgcttttccccggtggccgtgtgcaagacggccaccggggttttccttcatgttcctgattttatctgcccggtgtggcgttttcatctttgtgtgggtggttcgcctggggtcttggagtgtggtgacgcggtgatggtcacggtgacggtgactgtggcgcgtggcgggtgaggtggttctttcctggtctggtgtgtggcccaggtgagtgtggtgatgagggccagggtgaggatgatgaccagggtggggagtagtttgtctggccggtgtcgccgggcttggtggcgcggcatgtttttccagggtgtgtctccgaacaggtcgtcgtcggaggggtcgtcgtggttcatagggtggccttggcgatggtggtgggcgagtttggtccaggtgatggtgccgtcggaggcgatgtggcggtcggcgggcagggtgtggacggtccatccggcgtcggtgagggcggtggtgaaggatttcttgatggatcgtttgggtaggtcgatgggggcgtgggtgccgacccagatgcaccggtttttgaggtgggtggcgccgaggtggttcatgtcgcggaccatgttttgggtgagtgtgagggtgtcggggtcccattggacggggatgatgatgtggtctgcgatggtgatggcgtgttgccaggcggcgtcgaggtcgttgtttccggtgtcgaggatgatgacgtggaagcggcttcttagggcggtgatgatgcggtcgaggtcgtcggcggtggggggtgtgatgaggctgttgtggttgtcggtgatggtgggtaggcatgtgatggtggcccagccttctggttgccaggagatgtaggggtcgaggtcgcggggttgggaggcgaatcctgggtgacgggctgcgcgggcgaggtcgatgacggtgttgtcggtgtggcggggtgcgcgggtggagagggtgccgcgtgggttgatttccacgacgacgatgtcgtcgtgtcctgctgtggtggcgagggcttgggcaaggatgacggccagcggggttttgccggtgccgcctttgaggttggcgagggtgatgatgtggtcggtgagttgggcgggtgcggcggtgtggtgagggttggcggtgaggttggcgatggtgaacagggcatcgagatcgtcggtggtgttctgctcggtgggttgggggtcgccggagatgatcgggtcggcgcggcgcggctgccatgccggcctcaccactgtcacgaccaccacgggtctgctggcgctgtgtgggtgtcgtcggcgatgactcacgatcggcagtctcaccatcgtctcggtgatgctcggctagcgctggacccggtcaagttcgggccggctcacccagtggtgatgactcggtcacagaaccgctgccggtcgttatctcggacgtctcgactcctccagtcctgatgggcgttggagccacctacacctactctcagaacgaccccgacctcgtgtggggcgggggcagatgtcacttgggccaatcgagagcccaggtgatggggaaagcaggggtgtgatatctgtcctggaaaactgggcagctgctaccgtggattgacggatctccacgaaagaagggaatgcgaccatgcagatcaccgtcaagaccatcaaagatcatcgggttcgcactgtccagaccgccatgagcagcgccttggggattggttcccaggtagacatgctcgcccccggcggttccaccagctcgagttccggttcatgctgctcgtgctcgacctgcgcggtagtggcgcagcctcaagactgaacggctggtcagccccaggggcgtggcgctcatcgcgtcacgccccttctattcgctggacagggtgcgcgagctgaggaacatcgcggtgtgtgcgatgacgaggggcaggagcaagtctgtgcgggttgccaagtagccctgcgcgatggccatcacgctggccccgacggcggcgaagacacctccgatacgtcgcttcatgccgccgaattgcatcaggacgaataggactcccgcggtccacatccctccgggcatgcatctgggaaagatgaaccggaagatgatctcttcacaggagagctggagtactagcagcgtagcccccacggggagactcacctctactgacagacggatcgtcttcatccacccacccgagctggcatcgaccatttcggtggccatgcgcgaccggtggcctcgtgcctctcgctgcgtgtcgatccagccgagcagtccgtggacgctctccgctaggactcctgacgcgacagtctcaccaattcctaagcccacggcgaggaccgcgacgcccccctgcacggcaggctgtgtgacttggtggtcccaccaacccgccggcaggaccatgcgtgcgaggctgcacacgagcaggaggtggagggtcacgacgagcgacatctggaataccgcttgccgttcggcgatggtggcgttgggaaagagcggtaggccggcacgggcagcggcgctcgacagcttccgcaagagcggtttggagacgaagtagtaggcgacgtacagcgccagcgctgtcgcgatgatgatcatcggtctgccaccgagctgacccgccgatagccgtttctgttccaccaatactggctgttgtagatcaggtggcccagaacacaggcccagatcccccagaagatgaacaggatagtccccaaggcggcgagcgggatcttggagaggacctgtccccgtccgaacaccgagtggccgcaagcaaacaagagtgctcccacagcggtgagcgcgagccaggccggggttgctcgcagactgatcaccgggaccccgacccggaagccgacctcttctcctacagcgatgactagcaactgccacagcggcatgttctgaacggagcgcgcgactcgggctcgagtcacccacacgggctgttgagcgctcacatcaccactcaggtaccccggtgaggcacttcgcttagtactggggcccgatgtgcgagcattcgtgatgtgtcgcaggatccggttgtcaagccaagaggccagcagggctccggcgacagtgacgggtagcccgatcagcacgaggccccagccatgcggtgccgagaggtttctggccggcgtgcacgcgaggcaggcaagtgccaacactgccagcactacgacgtagatggtcgcataattcgacttgcgggtgacgttgccgaccatcttggccaaagtcgctggggaccagctgatgagtgcgatggtggtcagcaggaagcaggaccagacagacatccggcgcactcaggggtatgggtgcggctgtgggttttggaaaccgccatatgcggcgtagcgggggtgtgcccgcatgggtgcgctgggcagtgacagggcgagcagcccaggcgcccagagcctgacacagtgcagtcccagcccctggatctctatggtggtgaaatcttcgatgtacaggggtgacacacaggtgatgctgttgaccacgctctttaccagttccgcccccgtgtgggtgtcgtcaggtggcaggtcttcggcttgggcaatggtgcccgcgtcgaatttcgccacaactgattgcgcggcctgatagttcctcgcgtagtaggagacgttcgagtcgaggtcaagcatgtcctccgtggacatactggacgcgtcggcctcggcgtcgaaagacgtccataccgcgagcatccgaaccccgctgcactcgagaaacgccttgtacatggctgcttccagacccgcgtctgcacctaggccgacggcgacgaggggaagttggttgccactaccgaccatcatgcatgccacggtgaaatgcttgagcccgggagtcggaagccagtagaaacgcagttcgtggcttcggcccgctgcacgttccacgagccgctggatgcgctggaggcggggtccttcgacgcggatgcgcacaggtgacgaggctccataccacaggcccatcgcggcatctacctggatcaattcataagccgcggacagcgttgcggcgacgcgtgaagtgtggacggcggtgccggtcgtcacggccgttcccagccacggctcaccgtcgtgccgacgggggttgtaacccaggtaaaagaactgcgccgggatccactcctgccgggaggtcccgacacggggagtcttgacccatgtcatgggcaagtcgtcgcgataggtgtcgaacgcacctccagccactcgttgcgcgaagccgaatgcgcccagatcgagaacttcgtcctcggtccgggcgaggagttcctgacgagtcgcccagcgccgttcgaagggactatggagaatcccggtacccgcgcagtagcgctcgacggcctccgcgtagaccttgatctctgcctcaaactcgttcagccccaccccaccgatgtggtagctacccggcttggggtcgggccggtcaagcagtgcgtgcatccccgtgagttccccaccgttcacccgcacgcgggggccgagcgcggggtgcagcgagtagccgacggaagtcaccagcccgcatagcgggctgtaggtgcgccgcctgagccgggctgcggtctcgacggggtcgctatcctggcgaagcttcatcgctcgccccctgccgccagccactcacggatgtcgtagtacaggtccggagcggtttcaacctgcgctggtgcatcaaaacgggacataggtaggacgtcgttgtaggcgatctccatcgtcggtatgtagaccgacaacactttgttgcgcgtcgtgttgaggccgttgcgggcgatgctgacagcctcatgcgcgacgtgcgcggccaagatcgcgcgcaccgacgctgccacggccggcgctccggcccttacgcggtcggcagcggccacccgcatccaggacaggtagctctgccgttcgcgcaggttcatcgcgacccgctgctcgaaggtccggtaggacgaggtcgcaccagggacgacgtagggacccacgtacaaggccggcccgtctacagctgcgtggagccacgacaggtgggcgcgtcgggcgaacaggtcaagggcgcgcagcatagccgggttgttctgcgccagcgctaccacaaggagtggctgcaggtccggcgccgaacccagcaacgccaacatctgggaggcctcctgctccatgtgcaactcgtcggccgactgctcaagccgcaggcctgcgaagagggtggctgatggctgcgtgtcgtcagcgaggacggtagcctgcagcccctctccctcgagaatctgctggatatcgccggcgaggagcgcgtcgtcgctgaatacccacaccgggcgcgtctctctacctccatccatcttgtcctcaacgttttcgaccagcgcaccgatcgatgctaggtgggccatcacgtcgtcaagggccgcgcgggtcaatccgggcacccgggacacgatctcgggcggctgcagtccttggctcaacaagtccaaggccggccacagggtcccggtggcgtcgtcgtcctccagcgttgtgctctcggcgttccagacgcctcgacggaactccaccctgtccatcgagtaaggcaccatcatgaggcccggtgaaatgtggttggtcactttggctcctgtacagcctaggcttggacgcccacggtcatggtgtgggtcgcggtttggaaaatcccgtcgaggttgagtgcctgattgagttcgtcctcgtagaagcttgaggactcgactgaggcaagaccgagccccgtgcagaccaagttgatctgttgtgcgatcgccccgacttcttgaagggcgaacctcaaacccctggctccgtacttccgcatcgccctccacggcgagatgacgaacaccaagtgcactccggccgcatccgattgctccacggccggctcgccggccatcgaattcctcacgccgcgacagccctcttcaccggtcacgggcaccagtcgatcgatgaccggcgagtagcggtagacgccgcgactcaagccggacacccgttgtgcggacatgaagatagacacgggatacagccctccaccagacgggacagcgcgtacattataccgcacgatatcaccgctcgaacgtgggacatccacgtgccccgtcacaccggcagcacctctcagaaacgcagctacgtcacgcaggtctagggattcgccggtgtagttccgtccgctgcgccggcgggcgatcacttgctcgaggggtgcgcgcaccctgctggacctgggaagttcgatcacatcggcagcgaacgtgtcgcgatccatctgtccgtacgtaacgatcatggggtcaacgaaatagtcgccgaccgagacgttgaactccatatccccccgggcgatgcgcgaggcgagcaagaagtctgcagctgcgttagacagccccggcccatcagtgttgtcgcagcggaactcgtgggtccgaaaccccacaccttccgtgcccgggctctgcgctcgatacgacgtgatcgcagaactagccttccttaaaccgcccggagtagctaccatgaccgtcccctctgaggtctcccgaacacttgcgacaatagcagcatgtgggggcagccgccagaggcgggcatccttgtctcgacaaccattgacctccggattcgatatgtgcataatcatagtcgtgccaacacgaaacgtgtacgtctcggaagacgacctagacctgttcgccgaagccaccgagatcgctggaggcctgtccgcagcggtgttggaggccttgcgcagctacgtagacaggcaccatcgcgcggccggcggattcgacgagatcgagctggagctgcagaacgacggtatcgaccaccgtgtcaccttcatgggtcgccgcctgatacacatccgccgtccagatcccgagggaacccgcatagacactgtctacttgaccgccaaacaccaattcgccgttgccaccaaaatccaacgacggctgccagactggacgaccggccacgagcacatctggtccgacccggagacctggaatcgggagttctggatcgcaggtgacaagacgatggccgtgtatcccagccttgacaaactccgcgaagctgaccccaatgtggccgaacgcgccgaggccgcggtcaaaatcccgccgttcgaggtcctggacatctgatgacagaatcatcatcttcccggcggcaattggcaatgccggtgctgtcagtcacggatctagccaagaaatacgtggttcatggcggctacgaggtcccggcactcaacggtgtctcgtttgacctgcacccgggagagatgctgggtttgttcgggccaaacggtgctggaaagacgacgctggtcaggatcatcgcgggcctcttatcggcagattctggagacgtccactggggatcggatcaaggtcgggccaggttaggctacgtgtcccaaaagggtggactgcagtacgggctcacgtgccgggaagagatggtcttccacgcacaatgcttcggccagtccgccaagcaggcccggactagcgtcgacgaggtcgccgcgatgctgcactgcgattacctgatggagtgggacgtcggaaggctctccggtgggcaacgccgaatcatcgaggtagggctagcactcgtcaatcaaccatcggtcgtcctgctcgacgagcccaccctgggcctggaccccgcaacacgcctgtcgttgtggcaaacggtaaagtcggcacgccgtgagaccggtgctgccttcctcgtcaccacccactacattgacgaggtggccgagcacctgtccaacgtcagcgtgatcaaccacggaaccgtcgtcgccaacggctcgccagcgcacatccgagaaatgttcgcgaccggggaagtaacgctcggcgtggccgaggatacggtggacagtgcggtggacgtgttggctgggaccgcgttcgaggcgcaccccaccgaaaccgtcccggggatcgtggtcaggtccaggcatcccgacgtggacgcggccaagatcatcaccatcctggctggtcatggcatctcggtggactccatatccgtacgcgaggcgaccttggaagaggcgtttctcacgatcacaggcagtcgagacccggagaggcaaatcccatgaacacttgcttcaggcgatatgcggcgatgtcgctgagagcgcggcgtgatttggccctgacattcatccagcccctcgtctacctagccctcttcggaccgctcttcgtcacgacgatgaagatgtcgcagagagctaccgccgctacgggttactccctatacatcacgggcctgtccatccaaatggccatgacgatcggtgccttcgcggggctaaccatcatcctcgaataccgactcggcatcctcgaacggatctggagcacccccctcacggggagcaagatgatggcggggcgaatcgcgcgcgacgtcgttatgatgatgatgccgatactggtcgtcttcatcatcggcctggtgctgggaacacgccccagcccactgggcctggcgacctacttcgtgacagtgctcggcacaggagccacgttcgccggggtctcctacgcggtggcactcagaacgaagagcgaggcagcgctatccgcgatcttcaacctcatcctgctacccatcctcctgctgtcggggatcatgctgcccatgtcgttcgcaccacactggatcgccaccgctgcccacgtgaacccgttgtggtacctggtgcaaggcgcgcggaaccagttcagcgttctagggctcgtggcggcggccccatggagttgggctgtggccatcgtcatgtcagccgctgccttcggctgggcaagccacgaattcaacaagaggcgctgacacaaagaatggtgccgggaacccaggtccccggcaccaccgagtgcactcgcgacgtcaacgcaccgttgcggtcactgcgcaggtcgagcacgaggacgacgagcccgcgctgctgcaggtcgagccgccaggcgcgagcaggtcgacgttagcgtcggcgccgccgaagacggacgtgacggccggctgagaggtgcggatgcggtgctccagcgaggaggtggtggtgagtttcatgggaggtgctcctaggagtgagacgagaacaaaccctagcgataggttagcagtccgcaaccgactccgggaatagtagaagcgcgcatccgtagcggaagaccttagcctgattacagtgaccctgttcgcgtctcaacattattccacacccccgagcagcgaacgacaccgcgatgatgatccgtcgcctctccaccgaagaactccgcgcccacatcgcaccgggccgccgtcccgtgcatcagacctgccgtcaacgtcggccatgaagctgggaaggtggctctcgtctaggagcagacgcgggacgcctcctccaggttgggccggggaagtgtccggttcttgatgtaggtggcggtccctattgatgggcgttgaccgtgggaatgcggtcggcgaagggggtggcgaacccgttgagcgcaggcttccagcgcatgcatcaacgctgtctgccggccaccggcaagcctcacccgcccgtcatggccatcatcgaggtgccggtgaatcctcgacacatgatcccaactcccccggaggggcttccggggctgttcagccaccagatcagccaggcggcgagcccgactctgccacccggaccctgcagagcgtgcctgctgccgtcgtgtcgtgtcgggccagtgggccaccagatcggccacatccgtcttggcccatctccagcccgccagacccagggaggccatcacctcatcgacgccgcgccgggtggtctcatcaaccccgtcaaacagctcgggccacctcgatgatgccgtccgtgaacgatccagattcatgacatgctcctcttcacagatgccgacgacgatcaggccgtggccgtggcaacggggtgacctgccggcgcggctcacgacgttgagccggaaccacacgagacgcaccagtgtgctgcgccgtcttgagtcgggcgctgtactgggccctggcgctgtggtgaacagcccgacgaagcaccgaccgccggctgtcctcatcgccagggcgaggcatggggcgcggcatggtgcgcccggtagcagcatccatgagggtgatccggtcagccaaaatgccgagccggttttcccacttccggggccacggcaccagcaggtcacgctgacagcccacgccgtggcgtcggcagtccacaacattttctcacggccaggatgcgagtgcagcagctccaccggaacaccagcatcacgcacccgccgcatc

SEQ ID NO: 108 - DNA, 582 bp, Propionibacterium acnes
  source 1..582: mol_type = genomic DNA
accagatcggccacatccgtcttggcccatctccagcccgccagacccagggaggccatcacctcatcgacgccgcgccgggtggtctcatcaaccccgtcaaacagctcgggccacctcgatgatgccgtccgtgaacgatccagattcatgacatgctcctcttcacagatgccgacgacgatcaggccgtggccgtggcaacggggtgacctgccggcgcggctcacgacgttgagccggaaccacacgagacgcaccagtgtgctgcgccgtcttgagtcgggcgctgtactgggccctggcgctgtggtgaacagcccgacgaagcaccgaccgccggctgtcctcatcgccagggcgaggcatggggcgcggcatggtgcgcccggtagcagcatccatgagggtgatccggtcagccaaaatgccgagccggttttcccacttccggggccacggcaccagcaggtcacgctgacagcccacgccgtggcgtcggcagtccacaacattttctcacggccaggatgcgagtgcagcagctccaccggaacaccagcatcacgcacccgccgcatc

SEQ ID NO: 109 - DNA, 16496 bp, Propionibacterium acnes
  source 1..16496: mol_type = genomic DNA
gtgttccagtgcctcgcgggcgtgatgttcttcttcggcaccttcttgccacatgcttcgcgcttcagcctcgccatccaagcgaacctggactgtgaacgagtcctcatcgggtccgtcctcattccacgcggcaatgatcccacgggcctcgtctgcgacctgactcaacttcatcgcctgcccgacagccccgagagccggaatctcgaacacccagatattcgcctcagccgagacctcacgatgggcgatcacttcgtaggtcgtctcaccttctactgtcgtgtccattacttccactccttcggaattttcacgcctgctcgctccagctgtgccaggacaccaactgacgtcagctggtgtcctgctggtatcgatacgcgcccggctccgccggggcgtccccagatttcatggcttcccttggcgttccgcagacgggcccatccttgagaacggagcagcttgaggacgtccttagttttctgcggtttcacacatcatagtatagccccacttaacttgtaaactaagcccctgtttacattttagttggtgcatgtgatccctgctcttatgacgtcgcccgacctggcgccttagacatgcactgttcatcctcaaccacactcaccgtcacgggtccgaaggcgaggtctatcaccattcgcatcgatgaagttgaagcaggatcgtccgcatcacgcactgccgatccggacagacgccaccggccgtaccgactgtttacgatctgccaccgcagactgctgccataaccgctatcacctctgatagtacgtttagtactatcagaggtgattcaagattctcctgtcgagcagccctacagtcacgaagtcctgcgatcgtcatcgcttaaggcagacggatggccatcggggaccactcgcaaagcaggggcgatcagcaacagtgatgtgccatgagcaagtactggtgcaccggctgtttactccgcccctagataaaccacgggtgcaggggtggacaccacaccatgaccgatgtggtgcccaccccatggctcacaggcaggccctatcgccgggagcactgctgcagatgaggctcagtaacctgccatgtctcacctggggccaaggtgccaagctccccacggaatctcaggcatcggaaaccagcagccgaacttccacagcatgagcgccctacgaaaaagcaggccgccgacggttctcaagaactcgccggcggcctgcatcgccactcgaactgtaaccgtggtccgaccccgtgcacaggtaagctccacactcccaccaggcatggccgaggcagtaccaagttgccgtggcccatcggcagatttggttaaattttgaaaagtcatatagactccttctgtaaatttttaaatctcataggactctcgccatcgccagccagcttcgacaggagtcccgatgtttcaccgagtgaaatatcggcaccgtttgagttgacctaaagctcaaaagatgctagaatccatcttacctcgttaggggcgttttgtcaaacgcccctatattgcgtgtcttcgcgcgtcgtagcgctgatgctgcgcctgtgtcgactatccgtttgtaagtactttcgatgacaccagcagtggctactcatgactggtgcgtgcgggtctaaagcagcagggaaaggaatcgcagtagaagccgcttgattcctatcacccctgatggtactatcagtactaacagagcagggcttactcgatgcgtgagaatcggggacatgctgagcctctcgtaggtcattggcctgctgggcgtcagtgtggcgcggttcgatccagtgaactctatcagctctgttagtactgtcagagttgatatattcgaccccaggaggagcccatgagttacatcgttcgcaccggaaatttggtcgacacccccgagctgcgtgagggagagcatggcccgtacacctacgctcgcgtcatcgtgtccgatcgcattcgccaggaggacggcagctacgtcaacgggccagcgatcgcctacgacgtcttggcgggtggcagccaagccgtgaatctggttgaagccgccaaggcgagcggcaacatccgcatcatgttcgcgggccgttaccgcgtcaccgagtggcggggtgagcagggcactcgtatccagcatgaggtccgagccgacgaagtgagcgtgagcctgctcggtcagagggtgaccgtggagcggcctcgaggtgacgtggcatccaaggagagcacgtcgttctgattgagtccgggggcacggtggtcgccgtggtaaaccgtgcccctgacagtactattgacactattggaggtatcagtgtgactgctcaaattttcgccttgtgcaaccagaagggtggcgtcggaaagtcgacatcgacgtttcatctggcccgtgccgcggtgttgcgtggccagcgtgtgcttgtcgtcgacaacgacccccagggcaacctgacgtctgtcgcggccgccgagcccgtgggggaggatcaggcggggctggccgatgtgctcagcgcgcgtgctccagagaccctccgcgatgtgatcgtgccgggaatctggtctggcctcgatgtcgtgccgacgtctggcatcacgctcggctgggtgcgtgacgaactcgtgatcgccggtgccggccgagaaggccggctgcgggaggccctggccggcgtcgaggacgactacgacgtgatcctgatcgactgtgctccatcgctcgatcagctcacgatcaacggcctggtggccgcccagggtgtcatcgtcgtgacgcactcgaagttgtggagcgccaacggcctcgccccgctgctcgacaccatcgacagcgtgcgcagctactacaacggcgcgctgcgcgtggcgggcatcatcgtcaaccagcacgaggagaacaccatcagcgggaaaacctggctcgacgagctgcatcaggctgccgagtcccggaagctgaccgtgcttgacccgccgatccccaagcgtgtcgtcatcgccgataccgtcgaggccgcgcgcggtctcgacgagtggggaagtgccgaggcggccgcgctcggccagttgtacgcccaccacctgacctgcatcgaaggagccctgtgatgacccgtccagccccccgaaagtcctcattgagcggatcaactccggtcgccccgccggctcagacggcgccggcaccgtctgccgcacctaccccccacaaggccgatgagtcacagacgagcagcaccacgaggaagtggcggcacaaggtgtcgttctaccaggacccggccgacaccgaccgggtgcgcggggcgatcctttacacgatgacgaccgagggcaaccggaacctgagccagttcgtcaacgatgccgtcatggccaaggtggtcgagctggaagtcaagtacaacgatggccagccattccccgctgtgggagcccgaggactaccccagggcggtgcagccgccgccggtgagtagaggaccatcgaccgtcgggggcttcaccatgcccccgaccctcggtcatcctgatcctcttgtcgatggtggtgacagtgggggattcacgcctcgttcagatcagaggaagtctcaccgcgtgattagtactatcaaatctgacagtactaacagagcagatagggttccctaggtcgagctgtatcacgccgacaaccagtgagccagtgatctacgaggggcgcaatatgcacccgatcggtagccgcgaaggcctcgccctgccccgatagtactatcaccactatcaatggtgctagtggtgagtttcttccattgatgacaacagcacagtgctgccgtctgtgtgcgggccaccagcccgcacacagttgccgtcgaggacgttgttcatgctctgtggtggccggtcctgagggcggctcgcaggatctcccggcgctcacggcgacgagcctggtagccaaggtctgcatgttcggcggcgagacgggctttgagggttgcggcttctgcacggcggtggagttggtcgtcgatgagttgggcgcgggccagacgccgcttatgggggttgtcgtgggtgaggggggcgtcgaggctgccgtcgtgggttagggccagggctgctcgttcggcgtcgtcgaggccgatgtggtggacggtcacgggtgcggtggtgacgtcgaggatgtccaggtggatgttgtggccgccgccgggggcttcggggaagtctggtgggctggcctggccggtgtcggggtcataccaggacaggccgatgatctcggcccagggtgggggcgggcagacggctcgcagaagggtgtgggccaggaacgtgttgcgggccatgatgcctccaagggtgaaaagcagtcgagtagcgatgacggcggggtagccgtctgctgggctgaggccgaccgggcccatgtcctcgatgctcttgtgctgcggccataccccaaagctaccaaacagtctttttaatctcaaagatacaaacagtgcttgacatattatctgcagcgaaagatactttcatcatggtggctgatcatgattacgcgactcctgacgatgagtggatgacacctcctcaggtggcccgtgtgattccgaacaccactgctcaggctgtccggcgctgggctgaggagggtcagcttcctggggcgtttcgtactccttctgggcgttggcatattccgtggtcggctgtggtgggcatcatggggtttgatccgcgtgagtccgcatcaccgagtgatcgtcaccagagctgacagagtcgtcgatgagctttcgagtgcagagctgatggcacgacggtctggatacttgtggagatgagagacgaccacatccagtcatggtcggggtacaccgaggggcagattcagcagtgctggcacgatgaggttgcccctgccattgactcgctcatggagcaggtaaggtctgttgccgagactcctgtgccgccgggttcgagattttacggcgatgagcagtgggccaagccttttcatccgtctactgcgatctgcggttcaatgggtccgccagcgatcacttgcacgcgctgaagctcctcgtctgggaagcgaacgtccaccatgtctatgcgccgtacacccttgctcgtgcatctattgaggcatcgtctactgctgtgtggctgttgagcacgaagacgcgcggagaacgtgtgctgcgagccttgcgatggtacgcgcaggattgtcacgactcgtgcaggttcatggatgatgagcagtatcgtgaccacctattgcggcgcattgaggggactgtcgctgcgggaaatctcgactcgcgcgctgctaggaaacggtaccgtgcaaccgatgttgtcgatgaggctgatcagctggttcccggaactctgagggcgtggcgagctttttctggtatggcccattcccgtatgtgggcatccagggggctgctcgacatggaagtgctgtccagtggccaaggaatggttacggcgaaggtgacgagcggatcggcccaaatcctttgggccgtcgtggcagctctgaatgttgctctcagtgccgctcgcttgtggcgtgattcgatgtgctcaccgtttgctgttgcccagtcggtagacgcgatgccagaggcgtttcgccgccctgtttagggtctgatcggggtagtgggtgttcacggggtcccaggttggccatggggcggcttggtgatgtgagttgggttgtgtggcagcctgggtgttgggtgtggcttcgttggccacgaaggcatgctcttccttgtgctgggacttgagtccccagtgctctcccctttgctagtggggggtggggtccccggaggtaggtcctccggggactttttctatgtctgtccgtgccccaggatttcgtatctaggcagtaccaattttgggttagttggaggtttctttggtaatggacagggtgagggtgatgaagaggtggccgtccttggtggcagaaattttctcgaacttcagctgaatgttgttatcagccactatctgttgggcggtgaggtgctcggagagcttctggaatccttcgcggatccacaggttgtaggggttggtgaccgagaccgaagggtatgggtcgaccttcagcgtcaggactggctggtctgggttgagggagttgatcttcaccagtttggggtaccggtcgcactcatgtgtctcttgtgttgggggccagcagtcgggggcccattcctcccagtggtcacgcatctcacgaagtactttcctgcatctcagcctctgcaggagctcgcgcgccaccgatgggagggctgccatgatgagggcaaggactgcgaacccgatgatgtaattgaccgtgtccctcgtcacgccgttcttgccgaggattccgatggcgaacgcgatgacgacaccgcccaggcacaggtgcatggggtcatgctgtgatggtttttcttcttcagcgactggtggggctatagtcatgtgtgccccttagtactaagtgatactggtgggttgcttttccccggtggccgtgtgcaagacggccaccggggttttccttcatgttcctgattttatctgcccggtgtggcgttttcatctttgtgtgggtggttcgcctggggtcttggagtgtggtgacgcggtgatggtcacggtgacggtgactgtggcgcgtggcgggtgaggtggttctttcctggtctggtgtgtggcccaggtgagtgtggtgatgagggccagggtgaggatgatgaccagggtggggagtagtttgtctggccggtgtcgccgggcttggtggcgcggcatgtttttccagggtgtgtctccgaacaggtcgtcgtcggaggggtcgtcgtggttcatagggtggccttggcgatggtggtgggcgagtttggtccaggtgatggtgccgtcggaggcgatgtggcggtcggcgggcagggtgtggacggtccatccggcgtcggtgagggcggtggtgaaggatttcttgatggatcgtttgggtaggtcgatgggggcgtgggtgccgacccagatgcaccggtttttgaggtgggtggcgccgaggtggttcatgtcgcggaccatgttttgggtgagtgtgagggtgtcggggtcccattggacggggatgatgatgtggtctgcgatggtgatggcgtgttgccaggcggcgtcgaggtcgttgtttccggtgtcgaggatgatgacgtggaagcggcttcttagggcggtgatgatgcggtcgaggtcgtcggcggtggggggtgtgatgaggctgttgtggttgtcggtgatggtgggtaggcatgtgatggtggcccagccttctggttgccaggagatgtaggggccgaggtcgcggggttgggaggcgaatcctgggtgacgggctgcgcgggcgaggtcgatgacggtgttgtcggtgtggcggggtgcgcgggtggagagggtgccgcgtgggttgatttccacgacgacgatgtcgtcgtgtcctgctgtggtggcgagggcttgggcaaggatgacggccagcggggttttgccggtgccgcctttgaggttggcgagggtgatgatgtggtcggtgagttgggcgggtgcggcggtgtggtgagggttggcggtgaggttggcgatggtgaacagggcatcgagatcgtcggtggtgttctgctcggtgggttgggggtcgccggagatgatcgggtcggcgcggcgcggctgccatgccggcctcaccactgtcacgaccaccacgggtctgctggcgctgtgtgggtgtcgtcggcgatgactcacgatcggcagtctcaccatcgtctcggtgatgctcggctagcgctggacccggtcaagttcgggccggctcacccagtggtgatgactcggtcacagaaccgctgccggtcgttatctcggacgtctcgactcctccagtcctgatgggcgttggagccacctacacctactctcagaacgaccccgacctcgtgtggggcgggggcagatgtcacttgggccaatcgagagcccaggtgatggggaaagcaggggtgtgatatctgtcctggaaaactgggcagctgctaccgtggattgacggatctccacgaaagaagggaatgcgaccatgcagatcaccgtcaagaccatcaaagatcatcgggttcgcactgtccagaccgccatgagcagcgccttggggattggttcccaggtagacatgctcgcccccggcggttccaccagctcgagttccggttcatgctgctcgtgctcgacctgcgcggtagtggcgcagcctcaagactgaacggctggtcagccccaggggcgtggcgctcatcgcgtcacgccccttctattcgctggacagggtgcgcgagctgaggaacatcgcggtgtgtgcgatgacgaggggcaggagcaagtctgtgcgggttgccaagtagccctgcgcgatggccatcacgctggccccgacggcggcgaagacacctccgatacgtcgcttcatgccgccgaattgcatcaggacgaataggactcccgcggtccacatccctccgggcatgcatctgggaaagatgaaccggaagatgatctcttcacaggagagctggagtactagcagcgtagcccccacggggagactcacctctactgacagacggatcgtcttcatccacccacccgagctggcatcgaccatttcggtggccatgcgcgaccggtggcctcgtgcctctcgctgcgtgtcgatccagccgagcagtccgtggacgctctccgctaggactcctgacgcgacagtctcaccaattcctaagcccacggcgaggaccgcgacgcccccctgcacggcaggctgtgtgacttggtggtcccaccaacccgccggcaggaccatgcgtgcgaggctgcacacgagcaggaggtggagggtcacgacgagcgacatctggaataccgcttgccgttcggcgatggtggcgttgggaaagagcggtaggccggcacgggcagcggcgctcgacagcttccgcaagagcggtttggagacgaagtagtaggcgacgtacagcgccagcgctgtcgcgatgatgatcatcggtctgccaccgagctgacccgccgatagccgtttctgttccaccaatactggctgttgtagatcaggtggcccagaacacaggcccagatcccccagaagatgaacaggatagtccccaaggcggcgagcgggatcttggagaggacctgtccccgtccgaacaccgagtggccgcaagcaaacaagagtgctcccacagcggtgagcgcgagccaggccggggttgctcgcagactgatcaccgggaccccgacccggaagccgacctcttctcctacagcgatgactagcaactgccacagcggcatgttctgaacggagcgcgcgactcgggctcgagtcacccacacgggctgttgagcgctcacatcaccactcaggtaccccggtgaggcacttcgcttagtactggggcccgatgtgcgagcattcgtgatgtgtcgcaggatccggttgtcaagccaagaggccagcagggctccggcgacagtgacgggtagcccgatcagcacgaggccccagccatgcggtgccgagaggtttctggccggcgtgcacgcgaggcaggcaaatgccatcactgccagcactacgacgtagatggtcgcataattcgacttgcgggtgacgttgccgaccatcttggccaaagtcgctggggaccagctgatgagtgcgatggtggtcagcaggaagcaggaccagacagacatccggcgcactcaggggtatgggtgcggctgtgggttttggaaaccgccatatgcggcgtagcgggggtgtgcccgcatgggtgcgctgggcagtgacagggcgagcagcccaggcgcccagagcctgacacagtgcagtcccagcccctggatctctatggtggtgaaatcttcgatgtacaggggtgacacacaggtgatgctgttgaccacgctctttaccagttccgcccccgtgtgggtgtcgtcaggtggcaggtcttcggcttgggcaatggtgcccgcgtcgaatttcgccacaactgattgcgcggcctgatagttcctcgcgtagtaggagacgttcgagtcgaggtcaagcatgtcctccgtggacatactggacgcgtcggcctcggcgtcgaaagacgtccataccgcgagcatccgaaccccgctgcactcgagaaacgccttgtacatggctgcttccagacccgcgtctgcacctaggccgacggcgacgaggggaagttggttgccactaccgaccatcatgcatgccacggtgaaatgcttgagcccgggagtcggaagccagtagaaacgcagttcgtggcttcggcccgctgcacgttccacgagccgctggatgcgctggaggcggggtccttcgacgcggatgcgcacaggtgacgaggctccataccacaggcccatcgcggcatctacctggatcaattcataagccgcggacagcgttgcggcgacgcgtgaagtgtggacggcggtgccggtcgtcacggccgttcccagccacggctcaccgtcgtgccgacgggggttgtaacccaggtaaaagaactgcgccgggatccactcctgccgggaggtcccgacacggggagtcttgacccatgtcatgggcaagtcgtcgcgataggtgtcgaacgcacctccagccactcgttgcgcgaagccgaatgcgcccagatcgagaacttcgtcctcggtccgggcgaggagttcctgacgagtcgcccagcgccgttcgaagggactatggagaatcccggtacccgcgcagtagcgctcgacggcctccgcgtagaccttgatctctgcctcaaactcgttcagccccaccccaccgatgtggtagctacccggcttggggtcgggccggtcaagcagtgcgtgcatccccgtgagttccccaccgttcacccgcacgcgggggccgagcgcggggtgcagcgagtagccgacggaagtcaccagcccgcatagcgggctgtaggtgcgccgcctgagccgggctgcggtctcgacggggtcgctatcctggcgaagcttcatcgctcgccccctgccgccagccactcacggatgtcgtagtacaggtccggagcggtttcaacctgcgctggtgcatcaaaacgggacataggtaggacgtcgttgtaggcgatctccatcgtcggtatgtagaccgacaacactttgttgcgcgtcgtgttgaggccgttgcgggcgatgctgacagcctcatgcgcgacgtgcgcggccaagatcgcgcgcaccgacgctgccacggccggcgctccggcccttacgcggtcggcagcggccacccgcatccaggacaggtagctctgccgttcgcgcaggttcatcgcgacccgctgctcgaaggtccggtaggacgaggtcgcaccagggacgacgtagggacccacgtacaaggccggcccgtctacagctgcgtggagccacgacaggtgggcgcgtcgggcgaacaggtcaagggcgcgcagcatagccgggttgttctgcgccagcgctaccacaaggagtggctgcaggtccggcgccgaacccagcaacgccaacatctgggaggcctcctgctccatgtgcaactcgtcggccgactgctcaagccgcaggcctgcgaagagggtggctgatggctgcgtgtcgtcagcgaggacggtagcctgcagcccctctccctcgagaatctgctggatatcgccggcgaggagcgcgtcgtcgctgaatacccacaccgggcgcgtctctctacctccatccatcttgtcctcaacgttttcgaccagcgcaccgatcgatgctaggtgggccatcacgtcgtcaagggccgcgcgggtcaatccgggcacccgggacacgatctcgggcggctgcagtccttggctcaacaagtccaaggccggccacagggtcccggtggcgtcgtcgtcctccagcgttgtgctctcggcgttccagacgcctcgacggaactccaccctgtccatcgagtaaggcaccatcatgaggcccggtgaaatgtggttggtcactttggctcctgtacagcctaggcttggacgcccacggtcatggtgtgggtcgcggtttggaaaatcccgtcgaggttgagtgcctgattgagttcgtcctcgtagaagcttgaggactcgactgaggcaagaccgagccccgtgcagaccaagttgatctgttgtgcgatcgccccgacttcttgaagggcgaacctcaaacccctggctccgtacttccgcatcgccctccacggcgagatgacgaacaccaagtgcactccggccgcatccgattgctccacggccggctcgccggccatcgaattcctcacgccgcgacagccctcttcaccggtcacgggcaccagtcgatcgatgaccggcgagtagcggtagacgccgcgactcaagccggacacccgttgtgcggacatgaagatagacacgggatacagccctccaccagacgggacagcgcgtacattataccgcacgatatcaccgctcgaacgtgggacatccacgtgccccgtcacaccggcagcacctctcagaaacgcagctacgtcacgcaggtctagggattcgccggtgtagttccgtccgctgcgccggcgggcgatcacttgctcgaggggtgcgcgcaccctgctggacctgggaagttcgatcacatcggcagcgaacgtgtcgcgatccatctgtccgtacgtaacgatcatggggtcaacgaaatagtcgccgaccgagacgttgaactccatatccccccgggcgatgcgcgaggcgagcaagaagtctgcagctgcgttagacagccccggcccatcagtgttgtcgcagcggaactcgtgggtccgaaaccccacaccttccgtgcccgggctctgcgctcgatacgacgtgatcgcagaactagccttccttaaaccgcccggagtagctaccatgaccgtcccctctgaggtctcccgaacacttgcgacaatagcagcatgtgggggcagccgccagaggcgggcatccttgtctcgacaaccattgacctccggattcgatatgtgcataatcatagtcgtgccaacacgaaacgtgtacgtctcggaagacgacctagacctgttcgccgaagccaccgagatcgctggaggcctgtccgcagcggtgttggaggccttgcgcagctacgtagacaggcaccatcgcgcggccggcggattcgacgagatcgagctggagctgcagaacgacggtatcgaccaccgtgtcaccttcatgggtcgccgcctgatacacatccgccgtccagatcccgagggaacccgcatagacactgtctacttgaccgccaaacaccaattcgccgttgccaccaaaatccaacgacggctgccagactggacggccggccacgagcacatctggtccgacccggagacctggaatcgggagttctggatcgcaggtgacaagacgatggccgtgtatcccagccttgacaaactccgcgaagctgaccccaatgtggccgaacgcgccgaggccgcggtcaaaatcccgccgttcgaggtcctggacatctgatgacagaatcatcatcttcccggcggcaattggcaatgccggtgctgtcagtcacggatctagccaagaaatacgtggttcatggcggctacgaggtcccggcactcaacggtgtctcgtttgacctgcacccgggagagatgctgggtttgttcgggccaaacggtgctggaaagacgacgctggtcaggatcatcgcgggcctcttatcggcagattctggagacgtccactggggatcggatcaaggtcgggccaggttaggctacgtgtcccaaaagggtggactgcagtacgggctcacgtgccgggaagagatggtcttccacgcacaatgcttcggccagtccgccaagcaggcccggactagcgtcgacgaggtcgccgcgatgctgcactgcgattacctgatggagtgggacgtcggaaggctctccggtgggcaacgccgaatcatcgaggtagggctagcactcgtcaatcaaccatcggtcgtcctgctcgacgagcccaccctgggcctggaccccgcaacacgcctgtcgttgtggcaaacggtaaagtcggcacgccgtgagaccggtgctgccttcctcgtcaccacccactacattgacgaggtggccgagcacctgtccaacgtcagcgtgatcaaccacggaaccgtcgtcgccaacggctcgccagcgcacatccgagaaatgttcgcgaccggggaagtaacgctcggcgtggccgaggatacggtggacagtgcggtggacgtgttggctgggaccgcgttcgaggcgcaccccaccgaaaccgtcccggggatcgtggtcaggtccaggcatcccgacgtggacgcggccaagatcatcaccatcctggctggtcatggcatctcggtggactccatatccgtacgcgaggcgaccttggaagaggcgtttctcacgatcacaggcagtcgagacccggagaggcaaatcccatgaacacttgcttcaggcgatatgcggcgatgtcgctgagagcgcggcgtgatttggccctgacattcatccagcccctcgtctacctagccctcttcggaccgctcttcgtcacgacgatgaagatgtcgcagagagctaccgccgctacgggttactccctatacatcacgggcctgtccatccaaatggccatgacgatcggtgccttcgcggggctaaccatcatcctcgaataccgactcggcatcctcgaacggatctggagcacccccctcacggggagcaagatgatggcggggcgaatcgcgcgcgacgtcgttatgatgatgatgccgatactggtcgtcttcatcatcggcctggtgctgggaacacgccccagcccactgggcctggcgacctacttcgtgacagtgctcggcacaggagccacgttcgccggggtctcctacgcggtggcactcagaacgaagagcgaggcagcgctatccgcgatcttcaacctcatcctgctacccatcctcctgctgtcggggatcatgctgcccatgtcgttcgcaccacactggatcgccaccgctgcccacgtgaacccgttgtggtacctggtgcaaggcgcgcggaaccagttcagcgttctagggctcgtggcggcggccccatggagttgggctgtggccatcgtcatgtcagccgctgccttcggctgggcaagccacgaattcaacaagaggcgctgacacaaagaatggtgccgggaacccaggtccccggcaccaccgagtgcactcgcgacgtcaacgcaccgttgcggtcactgcgcaggtcgagcacgaggacgacgagcccgcgctgctgcaggtcgagccgccaggcgcgagcaggtcgacgttagcgtcggcgccgccgaagacggacgtgacggccggctgagaggtgcggatgcggtgctccagcgaggaggtggtggtgagtttcatgggaggtgctcctaggagtgagacgagaacaaaccctagcgataggttagcagtccgcaaccgactccgggaatagtagaagcgcgcatccgtagcggaagaccttagcctgattacagtgaccctgttcgcgtctcaacattattccacacccccgagcagcgaacgacaccgcgatgatgatccgtcgcctctccaccgaagaactccgcgcccacatcgcaccgggccgccgtcccgtgcatcagacctgccgtcaacgtcggccatgaagctgggaaggtggctctcgtctaggagcagacgcgggacgcctcctccaggttgggccggggaagtgtccggttcttgatgtaggtggcggtccctattgatgggcgttgaccgtgggaatgcggtcggcgaagggggtggcgaacccgttgagcgcaggcttccagcgcatgcatcaacgctgtctgccggccaccggcaagcctcacccgcccgtcatggccatcatcgaggtgccggtgaatcctcgacacatgatcccaactcccccggaggggcttccggggctgttcagccaccagatcagccaggcggcgagcccgactctgccacccggaccctgcagagcgtgcctgctgccgtcgtgtcgtgtcgggccagtgggccaccagatcggccacatccgtcttggcccatctcc

SEQ ID NO: 110 - DNA, 16494 bp, Propionibacterium acnes
  source 1..16494: mol_type = genomic DNA
gtgttccagtgcctcgcgggcgtgatgttcttcttcggcaccttcttgccacatgcttcgcgcttcagcctcgccatccaagcgaacctggactgtgaacgagtcctcatcgggtccgtcctcattccacgcggcaatgatcccacgggcctcgtctgcgacctgactcaacttcatcgcctgcccgacagccccgagagccggaatctcgaacacccagatattcgcctcagccgagacctcacgatgggcgatcacttcgtaggtcgtctcaccttctactgtcgtgtccattacttccactccttcggaattttcacgcctgctcgctccagctgtgccaggacaccaactgacgtcagctggtgtcctgctggtatcgatacgcgcccggctccgccggggcgtccccagatttcatggcttcccttggcgttccgcagacgggcccatccttgagaacggagcagcttgaggacgtccttagttttctgcggtttcacacatcatagtatagccccacttaacttgtaaactaagcccctgtttacattttagttggtgcatgtgatccctgctcttatgacgtcgcccgacctggcgccttagacatgcactgttcatcctcaaccacactcaccgtcacgggtccgaaggcgaggtctatcaccattcgcatcgatgaagttgaagcaggatcgtccgcatcacgcactgccgatccggacagacgccaccggccgtaccgactgtttacgatctgccaccgcagactgctgccataaccgctatcacctctgatagtacgtttagtactatcagaggtgattcaagattctcctgtcgagcagccctacagtcacgaagtcctgcgatcgtcatcgcttaaggcagacggatggccatcggggaccactcgcaaagcaggggcgatcagcaacagtgatgtgccatgagcaagtactggtgcaccggctgtttactccgcccctagataaaccacgggtgcaggggtggacaccacaccatgaccgatgtggtgcccaccccatggctcacaggcaggccctatcgccgggagcactgctgcagatgaggctcagtaacctgccatgtctcacctggggccaaggtgccaagctccccacggaatctcaggcatcggaaaccagcagccgaacttccacagcatgagcgccctacgaaaaagcaggccgccgacggttctcaagaactcgccggcggcctgcatcgccactcgaactgtaaccgtggtccgaccccgtgcacaggtaagctccacactcccaccaggcatggccgaggcagtaccaagttgccgtggcccatcggcagatttggttaaattttgaaaagtcatatagactccttctgtaaatttttaaatctcataggactctcgccatcgccagccagcttcgacaggagtcccgatgtttcaccgagtgaaatatcggcaccgtttgagttgacctaaagctcaaaagatgctagaatccatcttacctcgttaggggcgttttgtcaaacgcccctatattgcgtgtcttcgcgcgtcgtagcgctgatgctgcgcctgtgtcgactatccgtttgtaagtactttcgatgacaccagcagtggctactcatgactggtgcgtgcgggtctaaagcagcagggaaaggaatcgcagtagaagccgcttgattcctatcacccctgatggtactatcagtactaacagagcagggcttactcgatgcgtgagaatcggggacatgctgagcctctcgtaggtcattggcctgctgggcgtcagtgtggcgcggttcgatccagtgaactctatcagctctgttagtactgtcagagttgatatattcgaccccaggaggagcccatgagttacatcgttcgcaccggaaatttggtcgacacccccgagctgcgtgagggagagcatggcccgtacacctacgctcgcgtcatcgtgtccgatcgcattcgccaggaggacggcagctacgtcaacgggccagcgatcgcctacgacgtcttggcgggtggcagccaagccgtgaatctggttgaagccgccaaggcgagcggcaacatccgcatcatgttcgcgggccgttaccgcgtcaccgagtggcggggtgagcagggcactcgtatccagcatgaggtccgagccgacgaagtgagcgtgagcctgctcggtcagagggtgaccgtggagcggcctcgaggtgacgtggcatccaaggagagcacgtcgttctgattgagtccgggggcacggtggtcgccgtggtaaaccgtgcccctgacagtactattgacactattggaggtatcagtgtgactgctcaaattttcgccttgtgcaaccagaagggtggcgtcggaaagtcgacatcgacgtttcatctggcccgtgccgcggtgttgcgtggccagcgtgtgcttgtcgtcgacaacgacccccagggcaacctgacgtctgtcgcggccgccgagcccgtgggggaggatcaggcggggctggccgatgtgctcagcgcgcgtgctccagagaccctccgcgatgtgatcgtgccgggaatctggtctggcctcgatgtcgtgccgacgtctggcatcacgctcggctgggtgcgtgacgaactcgtgatcgccggtgccggccgagaaggccggctgcgggaggccctggccggcgtcgaggacgactacgacgtgatcctgatcgactgtgctccatcgctcgatcagctcacgatcaacggcctggtggccgcccagggtgtcatcgtcgtgacgcactcgaagttgtggagcgccaacggcctcgcccagctgctcgacaccatcgacagcgtgcgcagctactacaacggcgcgctgcgcgtggcgggcatcatcgtcaaccagcacgaggagaacaccatcagcgggaaaacctggctcgacgagctgcatcaggctgccgagtcccggaagctgaccgtgcttgacccgccgatccccaagcgtgtcgtcatcgccgataccgtcgaggccgcgcgcggtctcgacgagtggggaagtgccgaggcggccgcgctcggccagttgtacgcccaccacctgacctgcatcgaaggagccctgtgatgacccgtccagccccccgaaagtcctcattgagcggatcaactccggtcgccccgccggctcagacggcgccggcaccgtctgccgcacctaccccccacaaggccgatgagtcacagacgagcagcaccacgaggaagtggcggcacaaggtgtcgttctaccaggacccggccgacaccgaccgggtgcgcggggcgatcctttacacgatgacgaccgagggcaaccggaacctgagccagttcgtcaacgatgccgtcatggccaaggtggtcgagctggaagtcaagtacaacgatggccagccattccccgctgtgggagcccgaggactaccccagggcggtgcagccgccgccggtgagtagaggaccatcgaccgtcgggggcttcaccatgcccccgaccctcggtcatcctgatcctcttgtcgatggtggtgacagtgggggattcacgcctcgttcagatcagaggaagtctcaccgcgtgattagtactatcaaatctgacagtactaacagagcagatagggttccctaggtcgagctgtatcacgccgacaaccagtgagccagtgatctacgaggggcgcaatatgcacccgatcggtagccgcgaaggcctcgccctgccccgatagtactatcaccactatcaatggtgctagtggtgagtttcttccattgatgacaacagcacagtgctgccgtctgtgtgcgggccaccagcccgcacacagttgccgtcgaggacgttgttcatgctctgtggtggccggtcctgagggcggctcgcaggatctcccggcgctcacggcgacgagcctggtagccaaggtctgcatgttcggcggcgagacgggctttgagggttgcggcttctgcacggcggtggagttggtcgtcgatgagttgggcgcgggccagacgccgcttatgggggttgtcgtgggtgaggggggcgtcgaggctgccgtcgtgggttagggccagggctgctcgttcggcgtcgtcgaggccgatgtggtggacggtcacgggtgcggtggtgacgtcgaggatgtccaggtggatgttgtggccgccgccgggggcttcggggaagtctggtgggctggcctggccggtgtcggggtcataccaggacaggccgatgatctcggcccagggtgggggcgggcagacggctcgcagaagggtgtgggccaggaacgtgttgcgggccatgatgcctccaagggtgaaaagcagtcgagtagcgatgacggcggggtagccgtctgctgggctgaggccgaccgggcccatgtcctcgatgctcttgtgctgcggccataccccaaagctaccaaacagtctttttaatctcaaagatacaaacagtgcttgacatattatctgcagcgaaagatactttcatcatggtggctgatcatgattacgcgactcctgacgatgagtggatgacacctcctcaggtggcccgtgtgattccgaacaccactgctcaggctgtccggcgctgggctgaggagggtcagcttcctggggcgtttcgtactccttctgggcgttggcatattccgtggtcggctgtggtgggcatcatggggtttgatccgcgtgagtccgcatcaccgagtgatcgtcaccagagctgacagagtcgtcgatgagctttcgagtgcagagctgatggcacgacggtctggatacttgtggagatgagagacgaccacatccagtcatggtcggggtacaccgaggggcagattcagcagtgctggcacgatgaggttgcccctgccattgactcgctcatggagcaggtaaggtctgttgccgagactcctgtgccgccgggttcgagattttacggcgatgagcagtgggccaagccttttcatccgtctactgcgatctgcggttcaatgggtccgccagcgatcacttgcacgcgctgaagctcctcgtctgggaagcgaacgtccaccatgtctatgcgccgtacacccttgctcgtgcatctattgaggcatcgtctactgctgtgtggctgttgagcacgaagacgcgcggagaacgtgtgctgcgagccttgcgatggtacgcgcaggattgtcacgactcgtgcaggttcatggatgatgagcagtatcgtgaccacctattgcggcgcattgaggggactgtcgctgcgggaaatctcgactcgcgcgctgctaggaaacggtaccgtgcaaccgatgttgtcgatgaggctgatcagctggttcccggaactctgagggcgtggcgagctttttctggtatggcccattcccgtatgtgggcatccagggggctgctcgacatggaagtgctgtccagtggccaaggaatggttacggcgaaggtgacgagcggatcggcccaaatcctttgggccgtcgtggcagctctgaatgttgctctcagtgccgctcgcttgtggcgtgattcgatgtgctcaccgtttgctgttgcccagtcggtagacgcgatgccagaggcgtttcgccgccctgtttagggtctgatcggggtagtgggtgttcacggggtcccaggttggccatggggcggcttggtgatgtgagttgggttgtgtggcagcctgggtgttgggtgtggcttcgttggccacgaaggcatgctcttccttgtgctgggacttgagtccccagtgctctcccctttgctagtggggggtggggtccccggaggtaggtcctccggggactttttctatgtctgtccgtgccccaggatttcgtatctaggcagtaccaattttgggttagttggaggtttctttggtaatggacagggtgagggtgatgaagaggtggccgtccttggtggcagaaattttctcgaacttcagctgaatgttgttatcagccactatctgttgggcggtgaggtgctcggagagcttctggaatccttcgcggatccacaggttgtaggggttggtgaccgagaccgaagggtatgggtcgaccttcagcgtcaggactggctggtctgggttgagggagttgatcttcaccagtttggggtaccggtcgcactcatgtgtctcttgtgttgggggccagcagtcgggggcccattcctcccagtggtcacgcatctcacgaagtactttcctgcatctcagcctctgcaggagctcgcgcgccaccgatgggagggctgccatgatgagggcaaggactgcgaacccgatgatgtaattgaccgtgtccctcgtcacgccgttcttgccgaggattccgatggcgaacgcgatgacgacaccgcccaggcacaggtgcatggggtcatgctgtgatggtttttcttcttcagcgactggtggggctatagtcatgtgtgccccttagtactaagtgatactggtgggttgcttttccccggtggccgtgtgcaagacggccaccggggttttccttcatgttcctgattttatctgcccggtgtggcgttttcatctttgtgtgggtggttcgcctggggtcttggagtgtggtgacgcggtgatggtcacggtgacggtgactgtggcgcgtggcgggtgaggtggttctttcctggtctggtgtgtggcccaggtgagtgtggtgatgagggccagggtgaggatgatgaccagggtggggagtagtttgtctggccggtgtcgccgggcttggtggcgcggcatgtttttccagggtgtgtctccgaacaggtcgtcgtcggaggggtcgtcgtggttcatagggtggccttggcgatggtggtgggcgagtttggtccaggtgatggtgccgtcggaggcgatgtggcggtcggcgggcagggtgtggacggtccatccggcgtcggtgagggcggtggtgaaggatttcttgatggatcgtttgggtaggtcgatgggggcgtgggtgccgacccagatgcaccggtttttgaggtgggtggcgccgaggtggttcatgtcgcggaccatgttttgggtgagtgtgagggtgtcggggtcccattggacggggatgatgatgtggtctgcgatggtgatggcgtgttgccaggcggcgtcgaggtcgttgtttccggtgtcgaggatgatgacgtggaagcggcttcttagggcggtgatgatgcggtcgaggtcgtcggcggtggggggtgtgatgaggctgttgtggttgtcggtgatggtgggtaggcatgtgatggtggcccagccttctggttgccaggagatgtaggggccgaggtcgcggggttgggaggcgaatcctgggtgacgggctgcgcgggcgaggtcgatgacggtgttgtcggtgtggcggggtgcgcgggtggagagggtgccgcgtgggttgatttccacgacgacgatgtcgtcgtgtcctgctgtggtggcgagggcttgggcaaggatgacggccagcggggttttgccggtgccgcctttgaggttggcgagggtgatgatgtggtcggtgagttgggcgggtgcggcggtgtggtgagggttggcggtgaggttggcgatggtgaacagggcatcgagatcgtcggtggtgttctgctcggtgggttgggggtcgccggagatgatcgggtcggcgcggcgcggctgccatgccggcctcaccactgtcacgaccaccacgggtctgctggcgctgtgtgggtgtcgtcggcgatgactcacgatcggcagtctcaccatcgtctcggtgatgctcggctagcgctggacccggtcaagttcgggccggctcacccagtggtgatgactcggtcacagaaccgctgccggtcgttatctcggacgtctcgactcctccagtcctgatgggcgttggagccacctacacctactctcagaacgaccccgacctcgtgtggggcgggggcagatgtcacttgggccaatcgagagcccaggtgatggggaaagcaggggtgtgatatctgtcctggaaaactgggcagctgctaccgtggattgacggatctccacgaaagaagggaatgcgaccatgcagatcaccgtcaagaccatcaaagatcatcgggttcgcactgtccagaccgccatgagcagcgccttggggattggttcccaggtagacatgctcgcccccggcggttccaccagctcgagttccggttcatgctgctcgtgctcgacctgcgcggtagtggcgcagcctcaagactgaacggctggtcagccccaggggcgtggcgctcatcgcgtcacgccccttctattcgctggacagggtgcgcgagctgaggaacatcgcggtgtgtgcgatgacgaggggcaggagcaagtctgtgcgggttgccaagtagccctgcgcgatggccatcacgctggccccgacggcggcgaagacacctccgatacgtcgcttcatgccgccgaattgcatcaggacgaataggactcccgcggtccacatccctccgggcatgcatctgggaaagatgaaccggaagatgatctcttcacaggagagctggagtactagcagcgtagcccccacggggagactcacctctactgacagacggatcgtcttcatccacccacccgagctggcatcgaccatttcggtggccatgcgcgaccggtggcctcgtgcctctcgctgcgtgtcgatccagccgagcagtccgtggacgctctccgctaggactcctgacgcgacagtctcaccaattcctaagcccacggcgaggaccgcgacgcccccctgcacggcaggctgtgtgacttggtggtcccaccaacccgccggcaggaccatgcgtgcgaggctgcacacgagcaggaggtggagggtcacgacgagcgacatctggaataccgcttgccgttcggcgatggtggcgttgggaaagagcggtaggccggcacgggcagcggcgctcgacagcttccgcaagagcggtttggagacgaagtagtaggcgacgtacagcgccagcgctgtcgcgatgatgatcatcggtctgccaccgagctgacccgccgatagccgtttctgttccaccaatactggctgttgtagatcaggtggcccagaacacaggcccagatcccccagaagatgaacaggatagtccccaaggcggcgagcgggatcttggagaggacctgtccccgtccgaacaccgagtggccgcaagcaaacaagagtgctcccacagcggtgagcgcgagccaggccggggttgctcgcagactgatcaccgggaccccgacccggaagccgacctcttctcctacagcgatgactagcaactgccacagcggcatgttctgaacggagcgcgcgactcgggctcgagtcacccacacgggctgttgagcgctcacatcaccactcaggtaccccggtgaggcacttcgcttagtactggggcccgatgtgcgagcattcgtgatgtgtcgcaggatccggttgtcaagccaagaggccagcagggctccggcgacagtgacgggtagcccgatcagcacgaggccccagccatgcggtgccgagaggtttctggccggcgtgcacgcgaggcaggcaaatgccatcactgccagcactacgacgtagatggtcgcataattcgacttgcgggtgacgttgccgaccatcttggccaaagtcgctggggaccagctgatgagtgcgatggtggtcagcaggaagcaggaccagacagacatccggcgcactcaggggtatgggtgcggctgtgggttttggaaaccgccatatgcggcgtagcgggggtgtgcccgcatgggtgcgctgggcagtgacagggcgagcagcccaggcgcccagagcctgacacagtgcagtcccagcccctggatctctatggtggtgaaatcttcgatgtacaggggtgacacacaggtgatgctgttgaccacgctctttaccagttccgcccccgtgtgggtgtcgtcaggtggcaggtcttcggcttgggcaatggtgcccgcgtcgaatttcgccacaactgattgcgcggcctgatagttcctcgcgtagtaggagacgttcgagtcgaggtcaagcatgtcctccgtggacatactggacgcgtcggcctcggcgtcgaaagacgtccataccgcgagcatccgaaccccgctgcactcgagaaacgccttgtacatggctgcttccagacccgcgtctgcacctaggccgacggcgacgaggggaagttggttgccactaccgaccatcatgcatgccacggtgaaatgcttgagcccgggagtcggaagccagtagaaacgcagttcgtggcttcggcccgctgcacgttccacgagccgctggatgcgctggaggcggggtccttcgacgcggatgcgcacaggtgacgaggctccataccacaggcccatcgcggcatctacctggatcaattcataagccgcggacagcgttgcggcgacgcgtgaagtgtggacggcggtgccggtcgtcacggccgttcccagccacggctcaccgtcgtgccgacgggggttgtaacccaggtaaaagaactgcgccgggatccactcctgccgggaggtcccgacacggggagtcttgacccatgtcatgggcaagtcgtcgcgataggtgtcgaacgcacctccagccactcgttgcgcgaagccgaatgcgcccagatcgagaacttcgtcctcggtccgggcgaggagttcctgacgagtcgcccagcgccgttcgaagggactatggagaatcccggtacccgcgcagtagcgctcgacggcctccgcgtagaccttgatctctgcctcaaactcgttcagccccaccccaccgatgtggtagctacccggcttggggtcgggccggtcaagcagtgcgtgcatccccgtgagttccccaccgttcacccgcacgcgggggccgagcgcggggtgcagcgagtagccgacggaagtcaccagcccgcatagcgggctgtaggtgcgccgcctgagccgggctgcggtctcgacggggtcgctatcctggcgaagcttcatcgctcgccccctgccgccagccactcacggatgtcgtagtacaggtccggagcggtttcaacctgcgctggtgcatcaaaacgggacataggtaggacgtcgttgtaggcgatctccatcgtcggtatgtagaccgacaacactttgttgcgcgtcgtgttgaggccgttgcgggcgatgctgacagcctcatgcgcgacgtgcgcggccaagatcgcgcgcaccgacgctgccacggccggcgctccggcccttacgcggtcggcagcggccacccgcatccaggacaggtagctctgccgttcgcgcaggttcatcgcgacccgctgctcgaaggtccggtaggacgaggtcgcaccagggacgacgtagggacccacgtacaaggccggcccgtctacagctgcgtggagccacgacaggtgggcgcgtcgggcgaacaggtcaagggcgcgcagcatagccgggttgttctgcgccagcgctaccacaaggagtggctgcaggtccggcgccgaacccagcaacgccaacatctgggaggcctcctgctccatgtgcaactcgtcggccgactgctcaagccgcaggcctgcgaagagggtggctgatggctgcgtgtcgtcagcgaggacggtagcctgcagcccctctccctcgagaatctgctggatatcgccggcgaggagcgcgtcgtcgctgaatacccacaccgggcgcgtctctctacctccatccatcttgtcctcaacgttttcgaccagcgcaccgatcgatgctaggtgggccatcacgtcgtcaagggccgcgcgggtcaatccgggcacccgggacacgatctcgggcggctgcagtccttggctcaacaagtccaaggccggccacagggtcccggtggcgtcgtcgtcctccagcgttgtgctctcggcgttccagacgcctcgacggaactccaccctgtccatcgagtaaggcaccatcatgaggcccggtgaaatgtggttggtcactttggctcctgtacagcctaggcttggacgcccacggtcatggtgtgggtcgcggtttggaaaatcccgtcgaggttgagtgcctgattgagttcgtcctcgtagaagcttgaggactcgactgaggcaagaccgagccccgtgcagaccaagttgatctgttgtgcgatcgccccgacttcttgaagggcgaacctcaaacccctggctccgtacttccgcatcgccctccacggcgagatgacgaacaccaagtgcactccggccgcatccgattgctccacggccggctcgccggccatcgaattcctcacgccgcgacagccctcttcaccggtcacgggcaccagtcgatcgatgaccggcgagtagcggtagacgccgcgactcaagccggacacccgttgtgcggacatgaagatagacacgggatacagccctccaccagacgggacagcgcgtacattataccgcacgatatcaccgctcgaacgtgggacatccacgtgccccgtcacaccggcagcacctctcagaaacgcagctacgtcacgcaggtctagggattcgccggtgtagttccgtccgctgcgccggcgggcgatcacttgctcgaggggtgcgcgcaccctgctggacctgggaagttcgatcacatcggcagcgaacgtgtcgcgatccatctgtccgtacgtaacgatcatggggtcaacgaaatagtcgccgaccgagacgttgaactccatatccccccgggcgatgcgcgaggcgagcaagaagtctgcagctgcgttagacagccccggcccatcagtgttgtcgcagcggaactcgtgggtccgaaaccccacaccttccgtgcccgggctctgcgctcgatacgacgtgatcgcagaactagccttccttaaaccgcccggagtagctaccatgaccgtcccctctgaggtctcccgaacacttgcgacaatagcagcatgtgggggcagccgccagaggcgggcatccttgtctcgacaaccattgacctccggattcgatatgtgcataatcatagtcgtgccaacacgaaacgtgtacgtctcggaagacgacctagacctgttcgccgaagccaccgagatcgctggaggcctgtccgcagcggtgttggaggccttgcgcagctacgtagacaggcaccatcgcgcggccggcggattcgacgagatcgagctggagctgcagaacgacggtatcgaccaccgtgtcaccttcatgggtcgccgcctgatacacatccgccgtccagatcccgagggaacccgcatagacactgtctacttgaccgccaaacaccaattcgccgttgccaccaaaatccaacgacggctgccagactggacggccggccacgagcacatctggtccgacccggagacctggaatcgggagttctggatcgcaggtgacaagacgatggccgtgtatcccagccttgacaaactccgcgaagctgaccccaatgtggccgaacgcgccgaggccgcggtcaaaatcccgccgttcgaggtcctggacatctgatgacagaatcatcatcttcccggcggcaattggcaatgccggtgctgtcagtcacggatctagccaagaaatacgtggttcatggcggctacgaggtcccggcactcaacggtgtctcgtttgacctgcacccgggagagatgctgggtttgttcgggccaaacggtgctggaaagacgacgctggtcaggatcatcgcgggcctcttatcggcagattctggagacgtccactggggatcggatcaaggtcgggccaggttaggctacgtgtcccaaaagggtggactgcagtacgggctcacgtgccgggaagagatggtcttccacgcacaatgcttcggccagtccgccaagcaggcccggactagcgtcgacgaggtcgccgcgatgctgcactgcgattacctgatggagtgggacgtcggaaggctctccggtgggcaacgccgaatcatcgaggtagggctagcactcgtcaatcaaccatcggtcgtcctgctcgacgagcccaccctgggcctggaccccgcaacacgcctgtcgttgtggcaaacggtaaagtcggcacgccgtgagaccggtgctgccttcctcgtcaccacccactacattgacgaggtggccgagcacctgtccaacgtcagcgtgatcaaccacggaaccgtcgtcgccaacggctcgcccgcgcacatccgagaaatgttcgcgaccggggaagtaacgctcggcgtggccgaggatacggtggacagtgcggtggacgtgttggctgggaccgcgttcgaggcgcaccccaccgaaaccgtcccggggatcgtggtcaggtccaggcatcccgacgtggacgcggccaagatcatcaccatcctggctggtcatggcatctcggtggactccatatccgtacgcgaggcgaccttggaagaggcgtttctcacgatcacaggcagtcgagacccggagaggcaaatcccatgaacacttgcttcaggcgatatgcggcgatgtcgctgagagcgcggcgtgatttggccctgacattcatccagcccctcgtctacctagccctcttcggaccgctcttcgtcacgacgatgaagatgtcgcagagagctaccgccgctacgggttactccctatacatcacgggcctgtccatccaaatggccatgacgatcggtgccttcgcggggctaaccatcatcctcgaataccgactcggcatcctcgaacggatctggagcacccccctcacggggagcaagatgatggcggggcgaatcgcgcgcgacgtcgttatgatgatgatgccgatactggtcgtcttcatcatcggcctggtgctgggaacacgccccagcccactgggcctggcgacctacttcgtgacagtgctcggcacaggagccacgttcgccggggtctcctacgcggtggcactcagaacgaagagcgaggcagcgctatccgcgatcttcaacctcatcctgctacccatcctcctgctgtcggggatcatgctgcccatgtcgttcgcaccacactggatcgccaccgctgcccacgtgaacccgttgtggtacctggtgcaaggcgcgcggaaccagttcagcgttctagggctcgtggcggcggccccatggagttgggctgtggccatcgtcatgtcagccgctgccttcggctgggcaagccacgaattcaacaagaggcgctgacacaaagaatggtgccgggaacccaggtccccggcaccaccgagtgcactcgcgacgtcaacgcaccgttgcggtcactgcgcaggtcgagcacgaggacgacgagcccgcgctgctgcaggtcgagccgccaggcgcgagcaggtcgacgttagcgtcggcgccgccgaagacggacgtgacggccggctgagaggtgcggatgcggtgctccagcgaggaggtggtggtgagtttcatgggaggtgctcctaggagtgagacgagaacaaaccctagcgataggttagcagtccgcaaccgactccgggaatagtagaagcgcgcatccgtagcggaagaccttagcctgattacagtgaccctgttcgcgtctcaacattattccacacccccgagcagcgaacgacaccgcgatgatgatccgtcgcctctccaccgaagaactccgcgcccacatcgcaccgggccgccgtcccgtgcatcagacctgccgtcaacgtcggccatgaagctgggaaggtggctctcgtctaggagcagacgcgggacgcctcctccaggttgggccggggaagtgtccggttcttgatgtaggtggcggtccctattgatgggcgttgaccgtgggaatgcggtcggcgaagggggtggcgaacccgttgagcgcaggcttccagcgcatgcatcaacgctgtctgccggccaccggcaagcctcacccgcccgtcatggccatcatcgaggtgccggtgaatcctcgacacatgatcccaactcccccggaggggcttccggggctgttcagccaccagatcagccaggcggcgagcccgactctgccacccggaccctgcagagcgtgcctgctgccgtcgtgtcgtgtcgggccagtgggccaccagatcggccacatccgtcttggcccatct

SEQ ID NO: 111 - DNA, 16494 bp, Propionibacterium acnes
  source 1..16494: mol_type = genomic DNA
gtgttccagtgcctcgcgggcgtgatgttcttcttcggcaccttcttgccacatgcttcgcgcttcagcctcgccatccaagcgaacctggactgtgaacgagtcctcatcgggtccgtcctcattccacgcggcaatgatcccacgggcctcgtctgcgacctgactcaacttcatcgcctgcccgacagccccgagagccggaatctcgaacacccagatattcgcctcagccgagacctcacgatgggcgatcacttcgtaggtcgtctcaccttctactgtcgtgtccattacttccactccttcggaattttcacgcctgctcgctccagctgtgccaggacaccaactgacgtcagctggtgtcctgctggtatcgatacgcgcccggctccgccggggcgtccccagatttcatggcttcccttggcgttccgcagacgggcccatccttgagaacggagcagcttgaggacgtccttagttttctgcggtttcacacatcatagtatagccccacttaacttgtaaactaagcccctgtttacattttagttggtgcatgtgatccctgctcttatgacgtcgcccgacctggcgccttagacatgcactgttcatcctcaaccacactcaccgtcacgggtccgaaggcgaggtctatcaccattcgcatcgatgaagttgaagcaggatcgtccgcatcacgcactgccgatccggacagacgccaccggccgtaccgactgtttacgatctgccaccgcagactgctgccataaccgctatcacctctgatagtacgtttagtactatcagaggtgattcaagattctcctgtcgagcagccctacagtcacgaagtcctgcgatcgtcatcgcttaaggcagacggatggccatcggggaccactcgcaaagcaggggcgatcagcaacagtgatgtgccatgagcaagtactggtgcaccggctgtttactccgcccctagataaaccacgggtgcaggggtggacaccacaccatgaccgatgtggtgcccaccccatggctcacaggcaggccctatcgccgggagcactgctgcagatgaggctcagtaacctgccatgtctcacctggggccaaggtgccaagctccccacggaatctcaggcatcggaaaccagcagccgaacttccacagcatgagcgccctacgaaaaagcaggccgccgacggttctcaagaactcgccggcggcctgcatcgccactcgaactgtaaccgtggtccgaccccgtgcacaggtaagctccacactcccaccaggcatggccgaggcagtaccaagttgccgtggcccatcggcagatttggttaaattttgaaaagtcatatagactccttctgtaaatttttaaatctcataggactctcgccatcgccagccagcttcgacaggagtcccgatgtttcaccgagtgaaatatcggcaccgtttgagttgacctaaagctcaaaagatgctagaatccatcttacctcgttaggggcgttttgtcaaacgcccctatattgcgtgtcttcgcgcgtcgtagcgctgatgctgcgcctgtgtcgactatccgtttgtaagtactttcgatgacaccagcagtggctactcatgactggtgcgtgcgggtctaaagcagcagggaaaggaatcgcagtagaagccgcttgattcctatcacccctgatggtactatcagtactaacagagcagggcttactcgatgcgtgagaatcggggacatgctgagcctctcgtaggtcattggcctgctgggcgtcagtgtggcgcggttcgatccagtgaactctatcagctctgttagtactgtcagagttgatatattcgaccccaggaggagcccatgagttacatcgttcgcaccggaaatttggtcgacacccccgagctgcgtgagggagagcatggcccgtacacctacgctcgcgtcatcgtgtccgatcgcattcgccaggaggacggcagctacgtcaacgggccagcgatcgcctacgacgtcttggcgggtggcagccaagccgtgaatctggttgaagccgccaaggcgagcggcaacatccgcatcatgttcgcgggccgttaccgcgtcaccgagtggcggggtgagcagggcactcgtatccagcatgaggtccgagccgacgaagtgagcgtgagcctgctcggtcagagggtgaccgtggagcggcctcgaggtgacgtggcatccaaggagagcacgtcgttctgattgagtccgggggcacggtggtcgccgtggtaaaccgtgcccctgacagtactattgacactattggaggtatcagtgtgactgctcaaattttcgccttgtgcaaccagaagggtggcgtcggaaagtcgacatcgacgtttcatctggcccgtgccgcggtgttgcgtggccagcgtgtgcttgtcgtcgacaacgacccccagggcaacctgacgtctgtcgcggccgccgagcccgtgggggaggatcaggcggggctggccgatgtgctcagcgcgcgtgctccagagaccctccgcgatgtgatcgtgccgggaatctggtctggcctcgatgtcgtgccgacgtctggcatcacgctcggctgggtgcgtgacgaactcgtgatcgccggtgccggccgagaaggccggctgcgggaggccctggccggcgtcgaggacgactacgacgtgatcctgatcgactgtgctccatcgctcgatcagctcacgatcaacggcctggtggccgcccagggtgtcatcgtcgtgacgcactcgaagttgtggagcgccaacggcctcgcccagctgctcgacaccatcgacagcgtgcgcagctactacaacggcgcgctgcgcgtggcgggcatcatcgtcaaccagcacgaggagaacaccatcagcgggaaaacctggctcgacgagctgcatcaggctgccgagtcccggaagctgaccgtgcttgacccgccgatccccaagcgtgtcgtcatcgccgataccgtcgaggccgcgcgcggtctcgacgagtggggaagtgccgaggcggccgcgctcggccagttgtacgcccaccacctgacctgcatcgaaggagccctgtgatgacccgtccagccccccgaaagtcctcattgagcggatcaactccggtcgccccgccggctcagacggcgccggcaccgtctgccgcacctaccccccacaaggccgatgagtcacagacgagcagcaccacgaggaagtggcggcacaaggtgtcgttctaccaggacccggccgacaccgaccgggtgcgcggggcgatcctttacacgatgacgaccgagggcaaccggaacctgagccagttcgtcaacgatgccgtcatggccaaggtggtcgagctggaagtcaagtacaacgatggccagccattccccgctgtgggagcccgaggactaccccagggcggtgcagccgccgccggtgagtagaggaccatcgaccgtcgggggcttcaccatgcccccgaccctcggtcatcctgatcctcttgtcgatggtggtgacagtgggggattcacgcctcgttcagatcagaggaagtctcaccgcgtgattagtactatcaaatctgacagtactaacagagcagatagggttccctaggtcgagctgtatcacgccgacaaccagtgagccagtgatctacgaggggcgcaatatgcacccgatcggtagccgcgaaggcctcgccctgccccgatagtactatcaccactatcaatggtgctagtggtgagtttcttccattgatgacaacagcacagtgctgccgtctgtgtgcgggccaccagcccgcacacagttgccgtcgaggacgttgttcatgctctgtggtggccggtcctgagggcggctcgcaggatctcccggcgctcacggcgacgagcctggtagccaaggtctgcatgttcggcggcgagacgggctttgagggttgcggcttctgcacggcggtggagttggtcgtcgatgagttgggcgcgggccagacgccgcttatgggggttgtcgtgggtgaggggggcgtcgaggctgccgtcgtgggttagggccagggctgctcgttcggcgtcgtcgaggccgatgtggtggacggtcacgggtgcggtggtgacgtcgaggatgtccaggtggatgttgtggccgccgccgggggcttcggggaagtctggtgggctggcctggccggtgtcggggtcataccaggacaggccgatgatctcggcccagggtgggggcgggcagacggctcgcagaagggtgtgggccaggaacgtgttgcgggccatgatgcctccaagggtgaaaagcagtcgagtagcgatgacggcggggtagccgtctgctgggctgaggccgaccgggcccatgtcctcgatgctcttgtgctgcggccataccccaaagctaccaaacagtctttttaatctcaaagatacaaacagtgcttgacatattatctgcagcgaaagatactttcatcatggtggctgatcatgattacgcgactcctgacgatgagtggatgacacctcctcaggtggcccgtgtgattccgaacaccactgctcaggctgtccggcgctgggctgaggagggtcagcttcctggggcgtttcgtactccttctgggcgttggcatattccgtggtcggctgtggtgggcatcatggggtttgatccgcgtgagtccgcatcaccgagtgatcgtcaccagagctgacagagtcgtcgatgagctttcgagtgcagagctgatggcacgacggtctggatacttgtggagatgagagacgaccacatccagtcatggtcggggtacaccgaggggcagattcagcagtgctggcacgatgaggttgcccctgccattgactcgctcatggagcaggtaaggtctgttgccgagactcctgtgccgccgggttcgagattttacggcgatgagcagtgggccaagccttttcatccgtctactgcgatctgcggttcaatgggtccgccagcgatcacttgcacgcgctgaagctcctcgtctgggaagcgaacgtccaccatgtctatgcgccgtacacccttgctcgtgcatctattgaggcatcgtctactgctgtgtggctgttgagcacgaagacgcgcggagaacgtgtgctgcgagccttgcgatggtacgcgcaggattgtcacgactcgtgcaggttcatggatgatgagcagtatcgtgaccacctattgcggcgcattgaggggactgtcgctgcgggaaatctcgactcgcgcgctgctaggaaacggtaccgtgcaaccgatgttgtcgatgaggctgatcagctggttcccggaactctgagggcgtggcgagctttttctggtatggcccattcccgtatgtgggcatccagggggctgctcgacatggaagtgctgtccagtggccaaggaatggttacggcgaaggtgacgagcggatcggcccaaatcctttgggccgtcgtggcagctctgaatgttgctctcagtgccgctcgcttgtggcgtgattcgatgtgctcaccgtttgctgttgcccagtcggtagacgcgatgccagaggcgtttcgccgccctgtttagggtctgatcggggtagtgggtgttcacggggtcccaggttggccatggggcggcttggtgatgtgagttgggttgtgtggcagcctgggtgttgggtgtggcttcgttggccacgaaggcatgctcttccttgtgctgggacttgagtccccagtgctctcccctttgctagtggggggtggggtccccggaggtaggtcctccggggactttttctatgtctgtccgtgccccaggatttcgtatctaggcagtaccaattttgggttagttggaggtttctttggtaatggacagggtgagggtgatgaagaggtggccgtccttggtggcagaaattttctcgaacttcagctgaatgttgttatcagccactatctgttgggcggtgaggtgctcggagagcttctggaatccttcgcggatccacaggttgtaggggttggtgaccgagaccgaagggtatgggtcgaccttcagcgtcaggactggctggtctgggttgagggagttgatcttcaccagtttggggtaccggtcgcactcatgtgtctcttgtgttgggggccagcagtcgggggcccattcctcccagtggtcacgcatctcacgaagtactttcctgcatctcagcctctgcaggagctcgcgcgccaccgatgggagggctgccatgatgagggcaaggactgcgaacccgatgatgtaattgaccgtgtccctcgtcacgccgttcttgccgaggattccgatggcgaacgcgatgacgacaccgcccaggcacaggtgcatggggtcatgctgtgatggtttttcttcttcagcgactggtggggctatagtcatgtgtgccccttagtactaagtgatactggtgggttgcttttccccggtggccgtgtgcaagacggccaccggggttttccttcatgttcctgattttatctgcccggtgtggcgttttcatctttgtgtgggtggttcgcctggggtcttggagtgtggtgacgcggtgatggtcacggtgacggtgactgtggcgcgtggcgggtgaggtggttctttcctggtctggtgtgtggcccaggtgagtgtggtgatgagggccagggtgaggatgatgaccagggtggggagtagtttgtctggccggtgtcgccgggcttggtggcgcggcatgtttttccagggtgtgtctccgaacaggtcgtcgtcggaggggtcgtcgtggttcatagggtggccttggcgatggtggtgggcgagtttggtccaggtgatggtgccgtcggaggcgatgtggcggtcggcgggcagggtgtggacggtccatccggcgtcggtgagggcggtggtgaaggatttcttgatggatcgtttgggtaggtcgatgggggcgtgggtgccgacccagatgcaccggtttttgaggtgggtggcgccgaggtggttcatgtcgcggaccatgttttgggtgagtgtgagggtgtcggggtcccattggacggggatgatgatgtggtctgcgatggtgatggcgtgttgccaggcggcgtcgaggtcgttgtttccggtgtcgaggatgatgacgtggaagcggcttcttagggcggtgatgatgcggtcgaggtcgtcggcggtggggggtgtgatgaggctgttgtggttgtcggtgatggtgggtaggcatgtgatggtggcccagccttctggttgccaggagatgtaggggccgaggtcgcggggttgggaggcgaatcctgggtgacgggctgcgcgggcgaggtcgatgacggtgttgtcggtgtggcggggggcgcgggtggagagggtgccgcgtgggttgatttccacgacgacgatgtcgtcgtgtcctgctgtggtggcgagggcttgggcaaggatgacggccagcggggttttgccggtgccgcctttgaggttggcgagggtgatgatgtggtcggtgagttgggcgggtgcggcggtgtggtgagggttggcggtgaggttggcgatggtgaacagggcatcgagatcgtcggtggtgttctgctcggtgggttgggggtcgccggagatgatcgggtcggcgcggcgcggctgccatgccggcctcaccactgtcacgaccaccacgggtctgctggcgctgtgtgggtgtcgtcggcgatgactcacgatcggcagtctcaccatcgtctcggtgatgctcggctagcgctggacccggtcaagttcgggccggctcacccagtggtgatgactcggtcacagaaccgctgccggtcgttatctcggacgtctcgactcctccagtcctgatgggcgttggagccacctacacctactctcagaacgaccccgacctcgtgtggggcgggggcagatgtcacttgggccaatcgagagcccaggtgatggggaaagcaggggtgtgatatctgtcctggaaaactgggcagctgctaccgtggattgacggatctccacgaaagaagggaatgcgaccatgcagatcaccgtcaagaccatcaaagatcatcgggttcgcactgtccagaccgccatgagcagcgccttggggattggttcccaggtagacatgctcgcccccggcggttccaccagctcgagttccggttcatgctgctcgtgctcgacctgcgcggtagtggcgcagcctcaagactgaacggctggtcagccccaggggcgtggcgctcatcgcgtcacgccccttctattcgctggacagggtgcgcgagctgaggaacatcgcggtgtgtgcgatgacgaggggcaggagcaagtctgtgcgggttgccaagtagccctgcgcgatggccatcacgctggccccgacggcggcgaagacacctccgatacgtcgcttcatgccgccgaattgcatcaggacgaataggactcccgcggtccacatccctccgggcatgcatctgggaaagatgaaccggaagatgatctcttcacaggagagctggagtactagcagcgtagcccccacggggagactcacctctactgacagacggatcgtcttcatccacccacccgagctggcatcgaccatttcggtggccatgcgcgaccggtggcctcgtgcctctcgctgcgtgtcgatccagccgagcagtccgtggacgctctccgctaggactcctgacgcgacagtctcaccaattcctaagcccacggcgaggaccgcgacgcccccctgcacggcaggctgtgtgacttggtggtcccaccaacccgccggcaggaccatgcgtgcgaggctgcacacgagcaggaggtggagggtcacgacgagcgacatctggaataccgcttgccgttcggcgatggtggcgttgggaaagagcggtaggccggcacgggcagcggcgctcgacagcttccgcaagagcggtttggagacgaagtagtaggcgacgtacagcgccagcgctgtcgcgatgatgatcatcggtctgccaccgagctgacccgccgatagccgtttctgttccaccaatactggctgttgtagatcaggtggcccagaacacaggcccagatcccccagaagatgaacaggatagtccccaaggcggcgagcgggatcttggagaggacctgtccccgtccgaacaccgagtggccgcaagcaaacaagagtgctcccacagcggtgagcgcgagccaggccggggttgctcgcagactgatcaccgggaccccgacccggaagccgacctcttctcctacagcgatgactagcaactgccacagcggcatgttctgaacggagcgcgcgactcgggctcgagtcacccacacgggctgttgagcgctcacatcaccactcaggtaccccggtgaggcacttcgcttagtactggggcccgatgtgcgagcattcgtgatgtgtcgcaggatccggttgtcaagccaagaggccagcagggctccggcgacagtgacgggtagcccgatcagcacgaggccccagccatgcggtgccgagaggtttctggccggcgtgcacgcgaggcaggcaaatgccatcactgccagcactacgacgtagatggtcgcataattcgacttgcgggtgacgttgccgaccatcttggccaaagtcgctggggaccagctgatgagtgcgatggtggtcagcaggaagcaggaccagacagacatccggcgcactcaggggtatgggtgcggctgtgggttttggaaaccgccatatgcggcgtagcgggggtgtgcccgcatgggtgcgctgggcagtgacagggcgagcagcccaggcgcccagagcctgacacagtgcagtcccagcccctggatctctatggtggtgaaatcttcgatgtacaggggtgacacacaggtgatgctgttgaccacgctctttaccagttccgcccccgtgtgggtgtcgtcaggtggcaggtcttcggcttgggcaatggtgcccgcgtcgaatttcgccacaactgattgcgcggcctgatagttcctcgcgtagtaggagacgttcgagtcgaggtcaagcatgtcctccgtggacatactggacgcgtcggcctcggcgtcgaaagacgtccataccgcgagcatccgaaccccgctgcactcgagaaacgccttgtacatggctgcttccagacccgcgtctgcacctaggccgacggcgacgaggggaagttggttgccactaccgaccatcatgcatgccacggtgaaatgcttgagcccgggagtcggaagccagtagaaacgcagttcgtggcttcggcccgctgcacgttccacgagccgctggatgcgctggaggcggggtccttcgacgcggatgcgcacaggtgacgaggctccataccacaggcccatcgcggcatctacctggatcaattcataagccgcggacagcgttgcggcgacgcgtgaagtgtggacggcggtgccggtcgtcacggccgttcccagccacggctcaccgtcgtgccgacgggggttgtaacccaggtaaaagaactgcgccgggatccactcctgccgggaggtcccgacacggggagtcttgacccatgtcatgggcaagtcgtcgcgataggtgtcgaacgcacctccagccactcgttgcgcgaagccgaatgcgcccagatcgagaacttcgtcctcggtccgggcgaggagttcctgacgagtcgcccagcgccgttcgaagggactatggagaatcccggtacccgcgcagtagcgctcgacggcctccgcgtagaccttgatctctgcctcaaactcgttcagccccaccccaccgatgtggtagctacccggcttggggtcgggccggtcaagcagtgcgtgcatccccgtgagttccccaccgttcacccgcacgcgggggccgagcgcggggtgcagcgagtagccgacggaagtcaccagcccgcatagcgggctgtaggtgcgccgcctgagccgggctgcggtctcgacggggtcgctatcctggcgaagcttcatcgctcgccccctgccgccagccactcacggatgtcgtagtacaggtccggagcggtttcaacctgcgctggtgcatcaaaacgggacataggtaggacgtcgttgtaggcgatctccatcgtcggtatgtagaccgacaacactttgttgcgcgtcgtgttgaggccgttgcgggcgatgctgacagcctcatgcgcgacgtgcgcggccaagatcgcgcgcaccgacgctgccacggccggcgctccggcccttacgcggtcggcagcggccacccgcatccaggacaggtagctctgccgttcgcgcaggttcatcgcgacccgctgctcgaaggtccggtaggacgaggtcgcaccagggacgacgtagggacccacgtacaaggccggcccgtctacagctgcgtggagccacgacaggtgggcgcgtcgggcgaacaggtcaagggcgcgcagcatagccgggttgttctgcgccagcgctaccacaaggagtggctgcaggtccggcgccgaacccagcaacgccaacatctgggaggcctcctgctccatgtgcaactcgtcggccgactgctcaagccgcaggcctgcgaagagggtggctgatggctgcgtgtcgtcagcgaggacggtagcctgcagcccctctccctcgagaatctgctggatatcgccggcgaggagcgcgtcgtcgctgaatacccacaccgggcgcgtctctctacctccatccatcttgtcctcaacgttttcgaccagcgcaccgatcgatgctaggtgggccatcacgtcgtcaagggccgcgcgggtcaatccgggcacccgggacacgatctcgggcggctgcagtccttggctcaacaagtccaaggccggccacagggtcccggtggcgtcgtcgtcctccagcgttgtgctctcggcgttccagacgcctcgacggaactccaccctgtccatcgagtaaggcaccatcatgaggcccggtgaaatgtggttggtcactttggctcctgtacagcctaggcttggacgcccacggtcatggtgtgggtcgcggtttggaaaatcccgtcgaggttgagtgcctgattgagttcgtcctcgtagaagcttgaggactcgactgaggcaagaccgagccccgtgcagaccaagttgatctgttgtgcgatcgccccgacttcttgaagggcgaacctcaaacccctggctccgtacttccgcatcgccctccacggcgagatgacgaacaccaagtgcactccggccgcatccgattgctccacggccggctcgccggccatcgaattcctcacgccgcgacagccctcttcaccggtcacgggcaccagtcgatcgatgaccggcgagtagcggtagacgccgcgactcaagccggacacccgttgtgcggacatgaagatagacacgggatacagccctccaccagacgggacagcgcgtacattataccgcacgatatcaccgctcgaacgtgggacatccacgtgccccgtcacaccggcagcacctctcagaaacgcagctacgtcacgcaggtctagggattcgccggtgtagttccgtccgctgcgccggcgggcgatcacttgctcgaggggtgcgcgcaccctgctggacctgggaagttcgatcacatcggcagcgaacgtgtcgcgatccatctgtccgtacgtaacgatcatggggtcaacgaaatagtcgccgaccgagacgttgaactccatatccccccgggcgatgcgcgaggcgagcaagaagtctgcagctgcgttagacagccccggcccatcagtgttgtcgcagcggaactcgtgggtccgaaaccccacaccttccgtgcccgggctctgcgctcgatacgacgtgatcgcagaactagccttccttaaaccgcccggagtagctaccatgaccgtcccctctgaggtctcccgaacacttgcgacaatagcagcatgtgggggcagccgccagaggcgggcatccttgtctcgacaaccattgacctccggattcgatatgtgcataatcatagtcgtgccaacacgaaacgtgtacgtctcggaagacgacctagacctgttcgccgaagccaccgagatcgctggaggcctgtccgcagcggtgttggaggccttgcgcagctacgtagacaggcaccatcgcgcggccggcggattcgacgagatcgagctggagctgcagaacgacggtatcgaccaccgtgtcaccttcatgggtcgccgcctgatacacatccgccgtccagatcccgagggaacccgcatagacactgtctacttgaccgccaaacaccaattcgccgttgccaccaaaatccaacgacggctgccagactggacggccggccacgagcacatctggtccgacccggagacctggaatcgggagttctggatcgcaggtgacaagacgatggccgtgtatcccagccttgacaaactccgcgaagctgaccccaatgtggccgaacgcgccgaggccgcggtcaaaatcccgccgttcgaggtcctggacatctgatgacagaatcatcatcttcccggcggcaattggcaatgccggtgctgtcagtcacggatctagccaagaaatacgtggttcatggcggctacgaggtcccggcactcaacggtgtctcgtttgacctgcacccgggagagatgctgggtttgttcgggccaaacggtgctggaaagacgacgctggtcaggatcatcgcgggcctcttatcggcagattctggagacgtccactggggatcggatcaaggtcgggccaggttaggctacgtgtcccaaaagggtggactgcagtacgggctcacgtgccgggaagagatggtcttccacgcacaatgcttcggccagtccgccaagcaggcccggactagcgtcgacgaggtcgccgcgatgctgcactgcgattacctgatggagtgggacgtcggaaggctctccggtgggcaacgccgaatcatcgaggtagggctagcactcgtcaatcaaccatcggtcgtcctgctcgacgagcccaccctgggcctggaccccgcaacacgcctgtcgttgtggcaaacggtaaagtcggcacgccgtgagaccggtgctgccttcctcgtcaccacccactacattgacgaggtggccgagcacctgtccaacgtcagcgtgatcaaccacggaaccgtcgtcgccaacggctcgccagcgcacatccgagaaatgttcgcgaccggggaagtaacgctcggcgtggccgaggatacggtggacagtgcggtggacgtgttggctgggaccgcgttcgaggcgcaccccaccgaaaccgtcccggggatcgtggtcaggtccaggcatcccgacgtggacgcggccaagatcatcaccatcctggctggtcatggcatctcggtggactccatatccgtacgcgaggcgaccttggaagaggcgtttctcacgatcacaggcagtcgagacccggagaggcaaatcccatgaacacttgcttcaggcgatatgcggcgatgtcgctgagagcgcggcgtgatttggccctgacattcatccagcccctcgtctacctagccctcttcggaccgctcttcgtcacgacgatgaagatgtcgcagagagctaccgccgctacgggttactccctatacatcacgggcctgtccatccaaatggccatgacgatcggtgccttcgcggggctaaccatcatcctcgaataccgactcggcatcctcgaacggatctggagcacccccctcacggggagcaagatgatggcggggcgaatcgcgcgcgacgtcgttatgatgatgatgccgatactggtcgtcttcatcatcggcctggtgctgggaacacgccccagcccactgggcctggcgacctacttcgtgacagtgctcggcacaggagccacgttcgccggggtctcctacgcggtggcactcagaacgaagagcgaggcagcgctatccgcgatcttcaacctcatcctgctacccatcctcctgctgtcggggatcatgctgcccatgtcgttcgcaccacactggatcgccaccgctgcccacgtgaacccgttgtggtacctggtgcaaggcgcgcggaaccagttcagcgttctagggctcgtggcggcggccccatggagttgggctgtggccatcgtcatgtcagccgctgccttcggctgggcaagccacgaattcaacaagaggcgctgacacaaagaatggtgccgggaacccaggtccccggcaccaccgagtgcactcgcgacgtcaacgcaccgttgcggtcactgcgcaggtcgagcacgaggacgacgagcccgcgctgctgcaggtcgagccgccaggcgcgagcaggtcgacgttagcgtcggcgccgccgaagacggacgtgacggccggctgagaggtgcggatgcggtgctccagcgaggaggtggtggtgagtttcatgggaggtgctcctaggagtgagacgagaacaaaccctagcgataggttagcagtccgcaaccgactccgggaatagtagaagcgcgcatccgtagcggaagaccttagcctgattacagtgaccctgttcgcgtctcaacattattccacacccccgagcagcgaacgacaccgcgatgatgatccgtcgcctctccaccgaagaactccgcgcccacatcgcaccgggccgccgtcccgtgcatcagacctgccgtcaacgtcggccatgaagctgggaaggtggctctcgtctaggagcagacgcgggacgcctcctccaggttgggccggggaagtgtccggttcttgatgtaggtggcggtccctattgatgggcgttgaccgtgggaatgcggtcggcgaagggggtggcgaacccgttgagcgcaggcttccagcgcatgcatcaacgctgtctgccggccaccggcaagcctcacccgcccgtcatggccatcatcgaggtgccggtgaatcctcgacacatgatcccaactcccccggaggggcttccggggctgttcagccaccagatcagccaggcggcgagcccgactctgccacccggaccctgcagagcgtgcctgctgccgtcgtgtcgtgtcgggccagtgggccaccagatcggccacatccgtcttggcccatct

SEQ ID NO: 112 - DNA, 16494 bp, Propionibacterium acnes
  source 1..16494: mol_type = genomic DNA
gtgttccagtgcctcgcgggcgtgatgttcttcttcggcaccttcttgccacatgcttcgcgcttcagcctcgccatccaagcgaacctggactgtgaacgagtcctcatcgggtccgtcctcattccacgcggcaatgatcccacgggcctcgtctgcgacctgactcaacttcatcgcctgcccgacagccccgagagccggaatctcgaacacccagatattcgcctcagccgagacctcacgatgggcgatcacttcgtaggtcgtctcaccttctactgtcgtgtccattacttccactccttcggaattttcacgcctgctcgctccagctgtgccaggacaccaactgacgtcagctggtgtcctgctggtatcgatacgcgcccggctccgccggggcgtccccagatttcatggcttcccttggcgttccgcagacgggcccatccttgagaacggagcagcttgaggacgtccttagttttctgcggtttcacacatcatagtatagccccacttaacttgtaaactaagcccctgtttacattttagttggtgcatgtgatccctgctcttatgacgtcgcccgacctggcgccttagacatgcactgttcatcctcaaccacactcaccgtcacgggtccgaaggcgaggtctatcaccattcgcatcgatgaagttgaagcaggatcgtccgcatcacgcactgccgatccggacagacgccaccggccgtaccgactgtttacgatctgccaccgcagactgctgccataaccgctatcacctctgatagtacgtttagtactatcagaggtgattcaagattctcctgtcgagcagccctacagtcacgaagtcctgcgatcgtcatcgcttaaggcagacggatggccatcggggaccactcgcaaagcaggggcgatcagcaacagtgatgtgccatgagcaagtactggtgcaccggctgtttactccgcccctagataaaccacgggtgcaggggtggacaccacaccatgaccgatgtggtgcccaccccatggctcacaggcaggccctatcgccgggagcactgctgcagatgaggctcagtaacctgccatgtctcacctggggccaaggtgccaagctccccacggaatctcaggcatcggaaaccagcagccgaacttccacagcatgagcgccctacgaaaaagcaggccgccgacggttctcaagaactcgccggcggcctgcatcgccactcgaactgtaaccgtggtccgaccccgtgcacaggtaagctccacactcccaccaggcatggccgaggcagtaccaagttgccgtggcccatcggcagatttggttaaattttgaaaagtcatatagactccttctgtaaatttttaaatctcataggactctcgccatcgccagccagcttcgacaggagtcccgatgtttcaccgagtgaaatatcggcaccgtttgagttgacctaaagctcaaaagatgctagaatccatcttacctcgttaggggcgttttgtcaaacgcccctatattgcgtgtcttcgcgcgtcgtagcgctgatgctgcgcctgtgtcgactatccgtttgtaagtactttcgatgacaccagcagtggctactcatgactggtgcgtgcgggtctaaagcagcagggaaaggaatcgcagtagaagccgcttgattcctatcacccctgatggtactatcagtactaacagagcagggcttactcgatgcgtgagaatcggggacatgctgagcctctcgtaggtcattggcctgctgggcgtcagtgtggcgcggttcgatccagtgaactctatcagctctgttagtactgtcagagttgatatattcgaccccaggaggagcccatgagttacatcgttcgcaccggaaatttggtcgacacccccgagctgcgtgagggagagcatggcccgtacacctacgctcgcgtcatcgtgtccgatcgcattcgccaggaggacggcagctacgtcaacgggccagcgatcgcctacgacgtcttggcgggtggcagccaagccgtgaatctggttgaagccgccaaggcgagcggcaacatccgcatcatgttcgcgggccgttaccgcgtcaccgagtggcggggtgagcagggcactcgtatccagcatgaggtccgagccgacgaagtgagcgtgagcctgctcggtcagagggtgaccgtggagcggcctcgaggtgacgtggcatccaaggagagcacgtcgttctgattgagtccgggggcacggtggtcgccgtggtaaaccgtgcccctgacagtactattgacactattggaggtatcagtgtgactgctcaaattttcgccttgtgcaaccagaagggtggcgtcggaaagtcgacatcgacgtttcatctggcccgtgccgcggtgttgcgtggccagcgtgtgcttgtcgtcgacaacgacccccagggcaacctgacgtctgtcgcggccgccgagcccgtgggggaggatcaggcggggctggccgatgtgctcagcgcgcgtgctccagagaccctccgcgatgtgatcgtgccgggaatctggtctggcctcgatgtcgtgccgacgtctggcatcacgctcggctgggtgcgtgacgaactcgtgatcgccggtgccggccgagaaggccggctgcgggaggccctggccggcgtcgaggacgactacgacgtgatcctgatcgactgtgctccatcgctcgatcagctcacgatcaacggcctggtggccgcccagggtgtcatcgtcgtgacgcactcgaagttgtggagcgccaacggcctcgcccagctgctcgacaccatcgacagcgtgcgcagctactacaacggcgcgctgcgcgtggcgggcatcatcgtcaaccagcacgaggagaacaccatcagcgggaaaacctggctcgacgagctgcatcaggctgccgagtcccggaagctgaccgtgcttgacccgccgatccccaagcgtgtcgtcatcgccgataccgtcgaggccgcgcgcggtctcgacgagtggggaagtgccgaggcggccgcgctcggccagttgtacgcccaccacctgacctgcatcgaaggagccctgtgatgacccgtccagccccccgaaagtcctcattgagcggatcaactccggtcgccccgccggctcagacggcgccggcaccgtctgccgcacctaccccccacaaggccgatgagtcacagacgagcagcaccacgaggaagtggcggcacaaggtgtcgttctaccaggacccggccgacaccgaccgggtgcgcggggcgatcctttacacgatgacgaccgagggcaaccggaacctgagccagttcgtcaacgatgccgtcatggccaaggtggtcgagctggaagtcaagtacaacgatggccagccattccccgctgtgggagcccgaggactaccccagggcggtgcagccgccgccggtgagtagaggaccatcgaccgtcgggggcttcaccatgcccccgaccctcggtcatcctgatcctcttgtcgatggtggtgacagtgggggattcacgcctcgttcagatcagaggaagtctcaccgcgtgattagtactatcaaatctgacagtactaacagagcagatagggttccctaggtcgagctgtatcacgccgacaaccagtgagccagtgatctacgaggggcgcaatatgcacccgatcggtagccgcgaaggcctcgccctgccccgatagtactatcaccactatcaatggtgctagtggtgagtttcttccattgatgacaacagcacagtgctgccgtctgtgtgcgggccaccagcccgcacacagttgccgtcgaggacgttgttcatgctctgtggtggccggtcctgagggcggctcgcaggatctcccggcgctcacggcgacgagcctggtagccaaggtctgcatgttcggcggcgagacgggctttgagggttgcggcttctgcacggcggtggagttggtcgtcgatgagttgggcgcgggccagacgccgcttatgggggttgtcgtgggtgaggggggcgtcgaggctgccgtcgtgggttagggccagggctgctcgttcggcgtcgtcgaggccgatgtggtggacggtcacgggtgcggtggtgacgtcgaggatgtccaggtggatgttgtggccgccgccgggggcttcggggaagtctggtgggctggcctggccggtgtcggggtcataccaggacaggccgatgatctcggcccagggtgggggcgggcagacggctcgcagaagggtgtgggccaggaacgtgttgcgggccatgatgcctccaagggtgaaaagcagtcgagtagcgatgacggcggggtagccgtctgctgggctgaggccgaccgggcccatgtcctcgatgctcttgtgctgcggccataccccaaagctaccaaacagtctttttaatctcaaagatacaaacagtgcttgacatattatctgcagcgaaagatactttcatcatggtggctgatcatgattacgcgactcctgacgatgagtggatgacacctcctcaggtggcccgtgtgattccgaacaccactgctcaggctgtccggcgctgggctgaggagggtcagcttcctggggcgtttcgtactccttctgggcgttggcatattccgtggtcggctgtggtgggcatcatggggtttgatccgcgtgagtccgcatcaccgagtgatcgtcaccagagctgacagagtcgtcgatgagctttcgagtgcagagctgatggcacgacggtctggatacttgtggagatgagagacgaccacatccagtcatggtcggggtacaccgaggggcagattcagcagtgctggcacgatgaggttgcccctgccattgactcgctcatggagcaggtaaggtctgttgccgagactcctgtgccgccgggttcgagattttacggcgatgagcagtgggccaagccttttcatccgtctactgcgatctgcggttcaatgggtccgccagcgatcacttgcacgcgctgaagctcctcgtctgggaagcgaacgtccaccatgtctatgcgccgtacacccttgctcgtgcatctattgaggcatcgtctactgctgtgtggctgttgagcacgaagacgcgcggagaacgtgtgctgcgagccttgcgatggtacgcgcaggattgtcacgactcgtgcaggttcatggatgatgagcagtatcgtgaccacctattgcggcgcattgaggggactgtcgctgcgggaaatctcgactcgcgcgctgctaggaaacggtaccgtgcaaccgatgttgtcgatgaggctgatcagctggttcccggaactctgagggcgtggcgagctttttctggtatggcccattcccgtatgtgggcatccagggggctgctcgacatggaagtgctgtccagtggccaaggaatggttacggcgaaggtgacgagcggatcggcccaaatcctttgggccgtcgtggcagctctgaatgttgctctcagtgccgctcgcttgtggcgtgattcgatgtgctcaccgtttgctgttgcccagtcggtagacgcgatgccagaggcgtttcgccgccctgtttagggtctgatcggggtagtgggtgttcacggggtcccaggttggccatggggcggcttggtgatgtgagttgggttgtgtggcagcctgggtgttgggtgtggcttcgttggccacgaaggcatgctcttccttgtgctgggacttgagtccccagtgctctcccctttgctagtggggggtggggtccccggaggtaggtcctccggggactttttctatgtctgtccgtgccccaggatttcgtatctaggcagtaccaattttgggttagttggaggtttctttggtaatggacagggtgagggtgatgaagaggtggccgtccttggtggcagaaattttctcgaacttcagctgaatgttgttatcagccactatctgttgggcggtgaggtgctcggagagcttctggaatccttcgcggatccacaggttgtaggggttggtgaccgagaccgaagggtatgggtcgaccttcagcgtcaggactggctggtctgggttgagggagttgatcttcaccagtttggggtaccggtcgcactcatgtgtctcttgtgttgggggccagcagtcgggggcccattcctcccagtggtcacgcatctcacgaagtactttcctgcatctcagcctctgcaggagctcgcgcgccaccgatgggagggctgccatgatgagggcaaggactgcgaacccgatgatgtaattgaccgtgtccctcgtcacgccgttcttgccgaggattccgatggcgaacgcgatgacgacaccgcccaggcacaggtgcatggggtcatgctgtgatggtttttcttcttcagcgactggtggggctatagtcatgtgtgccccttagtactaagtgatactggtgggttgcttttccccggtggccgtgtgcaagacggccaccggggttttccttcatgttcctgattttatctgcccggtgtggcgttttcatctttgtgtgggtggttcgcctggggtcttggagtgtggtgacgcggtgatggtcacggtgacggtgactgtggcgcgtggcgggtgaggtggttctttcctggtctggtgtgtggcccaggtgagtgtggtgatgagggccagggtgaggatgatgaccagggtggggagtagtttgtctggccggtgtcgccgggcttggtggcgcggcatgtttttccagggtgtgtctccgaacaggtcgtcgtcggaggggtcgtcgtggttcatagggtggccttggcgatggtggtgggcgagtttggtccaggtgatggtgccgtcggaggcgatgtggcggtcggcgggcagggtgtggacggtccatccggcgtcggtgagggcggtggtgaaggatttcttgatggatcgtttgggtaggtcgatgggggcgtgggtgccgacccagatgcaccggtttttgaggtgggtggcgccgaggtggttcatgtcgcggaccatgttttgggtgagtgtgagggtgtcggggtcccattggacggggatgatgatgtggtctgcgatggtgatggcgtgttgccaggcggcgtcgaggtcgttgtttccggtgtcgaggatgatgacgtggaagcggcttcttagggcggtgatgatgcggtcgaggtcgtcggcggtggggggtgtgatgaggctgttgtggttgtcggtgatggtgggtaggcatgtgatggtggcccagccttctggttgccaggagatgtaggggtcgaggtcgcggggttgggaggcgaatcctgggtgacgggctgcgcgggcgaggtcgatgacggtgttgtcggtgtggcggggtgcgcgggtggagagggtgccgcgtgggttgatttccacgacgacgatgtcgtcgtgtcctgctgtggtggcgagggcttgggcaaggatgacggccagcggggttttgccggtgccgcctttgaggttggcgagggtgatgatgtggtcggtgagttgggcgggtgcggcggtgtggtgagggttggcggtgaggttggcgatggtgaacagggcatcgagatcgtcggtggtgttctgctcggtgggttgggggtcgccggagatgatcgggtcggcgcggcgcggctgccatgccggcctcaccactgtcacgaccaccacgggtctgctggcgctgtgtgggtgtcgtcggcgatgactcacgatcggcagtctcaccatcgtctcggtgatgctcggctagcgctggacccggtcaagttcgggccggctcacccagtggtgatgactcggtcacagaaccgctgccggtcgttatctcggacgtctcgactcctccagtcctgatgggcgttggagccacctacacctactctcagaacgaccccgacctcgtgtggggcgggggcagatgtcacttgggccaatcgagagcccaggtgatggggaaagcaggggtgtgatatctgtcctggaaaactgggcagctgctaccgtggattgacggatctccacgaaagaagggaatgcgaccatgcagatcaccgtcaagaccatcaaagatcatcgggttcgcactgtccagaccgccatgagcagcgccttggggattggttcccaggtagacatgctcgcccccggcggttccaccagctcgagttccggttcatgctgctcgtgctcgacctgcgcggtagtggcgcagcctcaagactgaacggctggtcagccccaggggcgtggcgctcatcgcgtcacgccccttctattcgctggacagggtgcgcgagctgaggaacatcgcggtgtgtgcgatgacgaggggcaggagcaagtctgtgcgggttgccaagtagccctgcgcgatggccatcacgctggccccgacggcggcgaagacacctccgatacgtcgcttcatgccgccgaattgcatcaggacgaataggactcccgcggtccacatccctccgggcatgcatctgggaaagatgaaccggaagatgatctcttcacaggagagctggagtactagcagcgtagcccccacggggagactcacctctactgacagacggatcgtcttcatccacccacccgagctggcatcgaccatttcggtggccatgcgcgaccggtggcctcgtgcctctcgctgcgtgtcgatccagccgagcagtccgtggacgctctccgctaggactcctgacgcgacagtctcaccaattcctaagcccacggcgaggaccgcgacgcccccctgcacggcaggctgtgtgacttggtggtcccaccaacccgccggcaggaccatgcgtgcgaggctgcacacgagcaggaggtggagggtcacgacgagcgacatctggaataccgcttgccgttcggcgatggtggcgttgggaaagagcggtaggccggcacgggcagcggcgctcgacagcttccgcaagagcggtttggagacgaagtagtaggcgacgtacagcgccagcgctgtcgcgatgatgatcatcggtctgccaccgagctgacccgccgatagccgtttctgttccaccaatactggctgttgtagatcaggtggcccagaacacaggcccagatcccccagaagatgaacaggatagtccccaaggcggcgagcgggatcttggagaggacctgtccccgtccgaacaccgagtggccgcaagcaaacaagagtgctcccacagcggtgagcgcgagccaggccggggttgctcgcagactgatcaccgggaccccgacccggaagccgacctcttctcctacagcgatgactagcaactgccacagcggcatgttctgaacggagcgcgcgactcgggctcgagtcacccacacgggctgttgagcgctcacatcaccactcaggtaccccggtgaggcacttcgcttagtactggggcccgatgtgcgagcattcgtgatgtgtcgcaggatccggttgtcaagccaagaggccagcagggctccggcgacagtgacgggtagcccgatcagcacgaggccccagccatgcggtgccgagaggtttctggccggcgtgcacgcgaggcaggcaaatgccatcactgccagcactacgacgtagatggtcgcataattcgacttgcgggtgacgttgccgaccatcttggccaaagtcgctggggaccagctgatgagtgcgatggtggtcagcaggaagcaggaccagacagacatccggcgcactcaggggtatgggtgcggctgtgggttttggaaaccgccatatgcggcgtagcgggggtgtgcccgcatgggtgcgctgggcagtgacagggcgagcagcccaggcgcccagagcctgacacagtgcagtcccagcccctggatctctatggtggtgaaatcttcgatgtacaggggtgacacacaggtgatgctgttgaccacgctctttaccagttccgcccccgtgtgggtgtcgtcaggtggcaggtcttcggcttgggcaatggtgcccgcgtcgaatttcgccacaactgattgcgcggcctgatagttcctcgcgtagtaggagacgttcgagtcgaggtcaagcatgtcctccgtggacatactggacgcgtcggcctcggcgtcgaaagacgtccataccgcgagcatccgaaccccgctgcactcgagaaacgccttgtacatggctgcttccagacccgcgtctgcacctaggccgacggcgacgaggggaagttggttgccactaccgaccatcatgcatgccacggtgaaatgcttgagcccgggagtcggaagccagtagaaacgcagttcgtggcttcggcccgctgcacgttccacgagccgctggatgcgctggaggcggggtccttcgacgcggatgcgcacaggtgacgaggctccataccacaggcccatcgcggcatctacctggatcaattcataagccgcggacagcgttgcggcgacgcgtgaagtgtggacggcggtgccggtcgtcacggccgttcccagccacggctcaccgtcgtgccgacgggggttgtaacccaggtaaaagaactgcgccgggatccactcctgccgggaggtcccgacacggggagtcttgacccatgtcatgggcaagtcgtcgcgataggtgtcgaacgcacctccagccactcgttgcgcgaagccgaatgcgcccagatcgagaacttcgtcctcggtccgggcgaggagttcctgacgagtcgcccagcgccgttcgaagggactatggagaatcccggtacccgcgcagtagcgctcgacggcctccgcgtagaccttgatctctgcctcaaactcgttcagccccaccccaccgatgtggtagctacccggcttggggtcgggccggtcaagcagtgcgtgcatccccgtgagttccccaccgttcacccgcacgcgggggccgagcgcggggtgcagcgagtagccgacggaagtcaccagcccgcatagcgggctgtaggtgcgccgcctgagccgggctgcggtctcgacggggtcgctatcctggcgaagcttcatcgctcgccccctgccgccagccactcacggatgtcgtagtacaggtccggagcggtttcaacctgcgctggtgcatcaaaacgggacataggtaggacgtcgttgtaggcgatctccatcgtcggtatgtagaccgacaacactttgttgcgcgtcgtgttgaggccgttgcgggcgatgctgacagcctcatgcgcgacgtgcgcggccaagatcgcgcgcaccgacgctgccacggccggcgctccggcccttacgcggtcggcagcggccacccgcatccaggacaggtagctctgccgttcgcgcaggttcatcgcgacccgctgctcgaaggtccggtaggacgaggtcgcaccagggacgacgtagggacccacgtacaaggccggcccgtctacagctgcgtggagccacgacaggtgggcgcgtcgggcgaacaggtcaagggcgcgcagcatagccgggttgttctgcgccagcgctaccacaaggagtggctgcaggtccggcgccgaacccagcaacgccaacatctgggaggcctcctgctccatgtgcaactcgtcggccgactgctcaagccgcaggcctgcgaagagggtggctgatggctgcgtgtcgtcagcgaggacggtagcctgcagcccctctccctcgagaatctgctggatatcgccggcgaggagcgcgtcgtcgctgaatacccacaccgggcgcgtctctctacctccatccatcttgtcctcaacgttttcgaccagcgcaccgatcgatgctaggtgggccatcacgtcgtcaagggccgcgcgggtcaatccgggcacccgggacacgatctcgggcggctgcagtccttggctcaacaagtccaaggccggccacagggtcccggtggcgtcgtcgtcctccagcgttgtgctctcggcgttccagacgcctcgacggaactccaccctgtccatcgagtaaggcaccatcatgaggcccggtgaaatgtggttggtcactttggctcctgtacagcctaggcttggacgcccacggtcatggtgtgggtcgcggtttggaaaatcccgtcgaggttgagtgcctgattgagttcgtcctcgtagaagcttgaggactcgactgaggcaagaccgagccccgtgcagaccaagttgatctgttgtgcgatcgccccgacttcttgaagggcgaacctcaaacccctggctccgtacttccgcatcgccctccacggcgagatgacgaacaccaagtgcactccggccgcatccgattgctccacggccggctcgccggccatcgaattcctcacgccgcgacagccctcttcaccggtcacgggcaccagtcgatcgatgaccggcgagtagcggtagacgccgcgactcaagccggacacccgttgtgcggacatgaagatagacacgggatacagccctccaccagacgggacagcgcgtacattataccgcacgatatcaccgctcgaacgtgggacatccacgtgccccgtcacaccggcagcacctctcagaaacgcagctacgtcacgcaggtctagggattcgccggtgtagttccgtccgctgcgccggcgggcgatcacttgctcgaggggtgcgcgcaccctgctggacctgggaagttcgatcacatcggcagcgaacgtgtcgcgatccatctgtccgtacgtaacgatcatggggtcaacgaaatagtcgccgaccgagacgttgaactccatatccccccgggcgatgcgcgaggcgagcaagaagtctgcagctgcgttagacagccccggcccatcagtgttgtcgcagcggaactcgtgggtccgaaaccccacaccttccgtgcccgggctctgcgctcgatacgacgtgatcgcagaactagccttccttaaaccgcccggagtagctaccatgaccgtcccctctgaggtctcccgaacacttgcgacaatagcagcatgtgggggcagccgccagaggcgggcatccttgtctcgacaaccattgacctccggattcgatatgtgcataatcatagtcgtgccaacacgaaacgtgtacgtctcggaagacgacctagacctgttcgccgaagccaccgagatcgctggaggcctgtccgcagcggtgttggaggccttgcgcagctacgtagacaggcaccatcgcgcggccggcggattcgacgagatcgagctggagctgcagaacgacggtatcgaccaccgtgtcaccttcatgggtcgccgcctgatacacatccgccgtccagatcccgagggaacccgcatagacactgtctacttgaccgccaaacaccaattcgccgttgccaccaaaatccaacgacggctgccagactggacgaccggccacgagcacatctggtccgacccggagacctggaatcgggagttctggatcgcaggtgacaagacgatggccgtgtatcccagccttgacaaactccgcgaagctgaccccaatgtggccgaacgcgccgaggccgcggtcaaaatcccgccgttcgaggtcctggacatctgatgacagaatcatcatcttcccggcggcaattggcaatgccggtgctgtcagtcacggatctagccaagaaatacgtggttcatggcggctacgaggtcccggcactcaacggtgtctcgtttgacctgcacccgggagagatgctgggtttgttcgggccaaacggtgctggaaagacgacgctggtcaggatcatcgcgggcctcttatcggcagattctggagacgtccactggggatcggatcaaggtcgggccaggttaggctacgtgtcccaaaagggtggactgcagtacgggctcacgtgccgggaagagatggtcttccacgcacaatgcttcggccagtccgccaagcaggcccggactagcgtcgacgaggtcgccgcgatgctgcactgcgattacctgatggagtgggacgtcggaaggctctccggtgggcaacgccgaatcatcgaggtagggctagcactcgtcaatcaaccatcggtcgtcctgctcgacgagcccaccctgggcctggaccccgcaacacgcctgtcgttgtggcaaacggtaaagtcggcacgccgtgagaccggtgctgccttcctcgtcaccacccactacattgacgaggtggccgagcacctgtccaacgtcagcgtgatcaaccacggaaccgtcgtcgccaacggctcgccagcgcacatccgagaaatgttcgcgaccggggaagtaacgctcggcgtggccgaggatacggtggacagtgcggtggacgtgttggctgggaccgcgttcgaggcgcaccccaccgaaaccgtcccggggatcgtggtcaggtccaggcatcccgacgtggacgcggccaagatcatcaccatcctggctggtcatggcatctcggtggactccatatccgtacgcgaggcgaccttggaagaggcgtttctcacgatcacaggcagtcgagacccggagaggcaaatcccatgaacacttgcttcaggcgatatgcggcgatgtcgctgagagcgcggcgtgatttggccctgacattcatccagcccctcgtctacctagccctcttcggaccgctcttcgtcacgacgatgaagatgtcgcagagagctaccgccgctacgggttactccctatacatcacgggcctgtccatccaaatggccatgacgatcggtgccttcgcggggctaaccatcatcctcgaataccgactcggcatcctcgaacggatctggagcacccccctcacggggagcaagatgatggcggggcgaatcgcgcgcgacgtcgttatgatgatgatgccgatactggtcgtcttcatcatcggcctggtgctgggaacacgccccagcccactgggcctggcgacctacttcgtgacagtgctcggcacaggagccacgttcgccggggtctcctacgcggtggcactcagaacgaagagcgaggcagcgctatccgcgatcttcaacctcatcctgctacccatcctcctgctgtcggggatcatgctgcccatgtcgttcgcaccacactggatcgccaccgctgcccacgtgaacccgttgtggtacctggtgcaaggcgcgcggaaccagttcagcgttctagggctcgtggcggcggccccatggagttgggctgtggccatcgtcatgtcagccgctgccttcggctgggcaagccacgaattcaacaagaggcgctgacacaaagaatggtgccgggaacccaggtccccggcaccaccgagtgcactcgcgacgtcaacgcaccgttgcggtcactgcgcaggtcgagcacgaggacgacgagcccgcgctgctgcaggtcgagccgccaggcgcgagcaggtcgacgttagcgtcggcgccgccgaagacggacgtgacggccggctgagaggtgcggatgcggtgctccagcgaggaggtggtggtgagtttcatgggaggtgctcctaggagtgagacgagaacaaaccctagcgataggttagcagtccgcaaccgactccgggaatagtagaagcgcgcatccgtagcggaagaccttagcctgattacagtgaccctgttcgcgtctcaacattattccacacccccgagcagcgaacgacaccgcgatgatgatccgtcgcctctccaccgaagaactccgcgcccacatcgcaccgggccgccgtcccgtgcatcagacctgccgtcaacgtcggccatgaagctgggaaggtggctctcgtctaggagcagacgcgggacgcctcctccaggttgggccggggaagtgtccggttcttgatgtaggtggcggtccctattgatgggcgttgaccgtgggaatgcggtcggcgaagggggtggcgaacccgttgagcgcaggcttccagcgcatgcatcaacgctgtctgccggccaccggcaagcctcacccgcccgtcatggccatcatcgaggtgccggtgaatcctcgacacatgatcccaactcccccggaggggcttccggggctgttcagccaccagatcagccaggcggcgagcccgactctgccacccggaccctgcagagcgtgcctgctgccgtcgtgtcgtgtcgggccagtgggccaccagatcggccacatccgtcttggcccatct

SEQ ID NO: 113 - DNA, 16493 bp, Propionibacterium acnes
  source 1..16493: mol_type = genomic DNA
gtgttccagtgcctcgcgggcgtgatgttcttcttcggcaccttcttgccacatgcttcgcgcttcagcctcgccatccaagcgaacctggactgtgaacgagtcctcatcgggtccgtcctcattccacgcggcaatgatcccacgggcctcgtctgcgacctgactcaacttcatcgcctgcccgacagccccgagagccggaatctcgaacacccagatattcgcctcagccgagacctcacgatgggcgatcacttcgtaggtcgtctcaccttctactgtcgtgtccattacttccactccttcggaattttcacgcctgctcgctccagctgtgccaggacaccaactgacgtcagctggtgtcctgctggtatcgatacgcgcccggctccgccggggcgtccccagatttcatggcttcccttggcgttccgcagacgggcccatccttgagaacggagcagcttgaggacgtccttagttttctgcagtttcacacatcatagtatagccccacttaacttgtaaactaagcccctgtttacattttagttggtgcatgtgatccctgctcttatgacgtcgcccgacctggcgccttagacatgcactgttcatcctcaaccacactcaccgtcacgggtccgaaggcgaggtctatcaccattcgcatcgatgaagttgaagcaggatcgtccgcatcacgcactgccgatccggacagacgccaccggccgtaccgactgtttacgatctgccaccgcagactgctgccataaccgctatcacctctgatagtacgtttagtactatcagaggtgattcaagattctcctgtcgagcagccctacagtcacgaagtcctgcgatcgtcatcgcttaaggcagacggatggccatcggggaccactcgcaaagcaggggcgatcagcaacagtgatgtgccatgagcaagtactggtgcaccggctgtttactccgcccctagataaaccacgggtgcaggggtggacaccacaccatgaccgatgtggtgcccaccccatggctcacaggcaggccctatcgccgggagcactgctgcagatgaggctcagtaacctgccatgtctcacctggggccaaggtgccaagctccccacggaatctcaggcatcggaaaccagcagccgaacttccacagcatgagcgccctacgaaaaagcaggccgccgacggttctcaagaactcgccggcggcctgcatcgccactcgaactgtaaccgtggtccgaccccgtgcacaggtaagctccacactcccaccaggcatggccgaggcagtaccaagttgccgtggcccatcggcagatttggttaaattttgaaaagtcatatagactccttctgtaaatttttaaatctcataggactctcgccatcgccagccagcttcgacaggagtcccgatgtttcaccgagtgaaatatcggcaccgtttgagttgacctaaagctcaaaagatgctagaatccatcttacctcgttaggggcgttttgtcaaacgcccctatattgcgtgtcttcgcgcgtcgtagcgctgatgctgcgcctgtgtcgactatccgtttgtaagtactttcgatgacaccagcagtggctactcatgactggtgcgtgcgggtctaaagcagcagggaaaggaatcgcagtagaagccgcttgattcctatcacccctgatggtactatcagtactaacagagcagggcttactcgatgcgtgagaatcggggacatgctgagcctctcgtaggtcattggcctgctgggcgtcagtgtggcgcggttcgatccagtgaactctatcagctctgttagtactgtcagagttgatatattcgaccccaggaggagcccatgagttacatcgttcgcaccggaaatttggtcgacacccccgagctgcgtgagggagagcatggcccgtacacctacgctcgcgtcatcgtgtccgatcgcattcgccaggaggacggcagctacgtcaacgggccagcgatcgcctacgacgtcttggcgggtggcagccaagccgtgaatctggttgaagccgccaaggcgagcggcaacatccgcatcatgttcgcgggccgttaccgcgtcaccgagtggcgggggagcagggcactcgtatccagcatgaggtccgagccgacgaagtgagcgtgagcctgctcggtcagagggtgaccgtggagcggcctcgaggtgacgtggcatccaaggagagcacgtcgttctgattgagtccgggggcacggtggtcgccgtggtaaaccgtgcccctgacagtactattgacactattggaggtatcagtgtgactgctcaaattttcgccttgtgcaaccagaagggtggcgtcggaaagtcgacatcgacgtttcatctggcccgtgccgcggtgttgcgtggccagcgtgtgcttgtcgtcgacaacgacccccagggcaacctgacgtctgtcgcggccgccgagcccgtgggggaggatcaggcggggctggccgatgtgctcagcgcgcgtgctccagagaccctccgcgatgtgatcgtgccgggaatctggtctggcctcgatgtcgtgccgacgtctggcatcacgctcggctgggtgcgtgacgaactcgtgatcgccggtgccggccgagaaggccggctgcgggaggccctggccggcgtcgaggacgactacgacgtgatcctgatcgactgtgctccatcgctcgatcagctcacgatcaacggcctggtggccgcccagggtgtcatcgtcgtgacgcactcgaagttgtggagcgccaacggcctcgcccagctgctcgacaccatcgacagcgtgcgcagctactacaacggcgcgctgcgcgtggcgggcatcatcgtcaaccagcacgaggagaacaccatcagcgggaaaacctggctcgacgagctgcatcaggctgccgagtcccggaagctgaccgtgcttgacccgccgatccccaagcgtgtcgtcatcgccgataccgtcgaggccgcgcgcggtctcgacgagtggggaagtgccgaggcggccgcgctcggccagttgtacgcccaccacctgacctgcatcgaaggagccctgtgatgacccgtccagccccccgaaagtcctcattgagcggatcaactccggtcgccccgccggctcagacggcgccggcaccgtctgccgcacctaccccccacaaggccgatgagtcacagacgagcagcaccacgaggaagtggcggcacaaggtgtcgttctaccaggacccggccgacaccgaccgggtgcgcggggcgatcctttacacgatgacgaccgagggcaaccggaacctgagccagttcgtcaacgatgccgtcatggccaaggtggtcgagctggaagtcaagtacaacgatggccagccattccccgctgtgggagcccgaggactaccccagggcggtgcagccgccgccggtgagtagaggaccatcgaccgtcgggggcttcaccatgcccccgaccctcggtcatcctgatcctcttgtcgatggtggtgacagtgggggattcacgcctcgttcagatcagaggaagtctcaccgcgtgattagtactatcaaatctgacagtactaacagagcagatagggttccctaggtcgagctgtatcacgccgacaaccagtgagccagtgatctacgaggggcgcaatatgcacccgatcggtagccgcgaaggcctcgccctgccccgatagtactatcaccactatcaatggtgctagtggtgagtttcttccattgatgacaacagcacagtgctgccgtctgtgtgcgggccaccagcccgcacacagttgccgtcgaggacgttgttcatgctctgtggtggccggtcctgagggcggctcgcaggatctcccggcgctcacggcgacgagcctggtagccaaggtctgcatgttcggcggcgagacgggctttgagggttgcggcttctgcacggcggtggagttggtcgtcgatgagttgggcgcgggccagacgccgcttatgggggttgtcgtgggtgaggggggcgtcgaggctgccgtcgtgggttagggccagggctgctcgttcggcgtcgtcgaggccgatgtggtggacggtcacgggtgcggtggtgacgtcgaggatgtccaggtggatgttgtggccgccgccgggggcttcggggaagtctggtgggctggcctggccggtgtcggggtcataccaggacaggccgatgatctcggcccagggtgggggcgggcagacggctcgcagaagggtgtgggccaggaacgtgttgcgggccatgatgcctccaagggtgaaaagcagtcgagtagcgatgacggcggggtagccgtctgctgggctgaggccgaccgggcccatgtcctcgatgctcttgtgctgcggccataccccaaagctaccaaacagtctttttaatctcaaagatacaaacagtgcttgacatattatctgcagcgaaagatactttcatcatggtggctgatcatgattacgcgactcctgacgatgagtggatgacacctcctcaggtggcccgtgtgattccgaacaccactgctcaggctgtccggcgctgggctgaggagggtcagcttcctggggcgtttcgtactccttctgggcgttggcatattccgtggtcggctgtggtgggcatcatggggtttgatccgcgtgagtccgcatcaccgagtgatcgtcaccagagctgacagagtcgtcgatgagctttcgagtgcagagctgatggcacgacggtctggatacttgtggagatgagagacgaccacatccagtcatggtcggggtacaccgaggggcagattcagcagtgctggcacgatgaggttgcccctgccattgactcgctcatggagcaggtaaggtctgttgccgagactcctgtgccgccgggttcgagattttacggcgatgagcagtgggccaagccttttcatccgtctactgcgatctgcggttcaatgggtccgccagcgatcacttgcacgcgctgaagctcctcgtctgggaagcgaacgtccaccatgtctatgcgccgtacacccttgctcgtgcatctattgaggcatcgtctactgctgtgtggctgttgagcacgaagacgcgcggagaacgtgtgctgcgagccttgcgatggtacgcgcaggattgtcacgactcgtgcaggttcatggatgatgagcagtatcgtgaccacctattgcggcgcattgaggggactgtcgctgcgggaaatctcgactcgcgcgctgctaggaaacggtaccgtgcaaccgatgttgtcgatgaggctgatcagctggttcccggaactctgagggcgtggcgagctttttctggtatggcccattcccgtatgtgggcatccagggggctgctcgacatggaagtgctgtccagtggccaaggaatggttacggcgaaggtgacgagcggatcggcccaaatcctttgggccgtcgtggcagctctgaatgttgctctcagtgccgctcgcttgtggcgtgattcgatgtgctcaccgtttgctgttgcccagtcggtagacgcgatgccagaggcgtttcgccgccctgtttagggtctgatcggggtagtgggtgttcacggggtcccaggttggccatggggcggcttggtgatgtgagttgggttgtgtggcagcctgggtgttgggtgtggcttcgttggccacgaaggcatgctcttccttgtgctgggacttgagtccccagtgctctcccctttgctagtggggggtggggtccccggaggtaggtcctccggggactttttctatgtctgtccgtgccccaggatttcgtatctaggcagtaccaattttgggttagttggaggtttctttggtaatggacagggtgagggtgatgaagaggtggccgtccttggtggcagaaattttctcgaacttcagctgaatgttgttatcagccactatctgttgggcggtgaggtgctcggagagcttctggaatccttcgcggatccacaggttgtaggggttggtgaccgagaccgaagggtatgggtcgaccttcagcgtcaggactggctggtctgggttgagggagttgatcttcaccagtttggggtaccggtcgcactcatgtgtctcttgtgttgggggccagcagtcgggggcccattcctcccagtggtcacgcatctcacgaagtactttcctgcatctcagcctctgcaggagctcgcgcgccaccgatgggagggctgccatgatgagggcaaggactgcgaacccgatgatgtaattgaccgtgtccctcgtcacgccgttcttgccgaggattccgatggcgaacgcgatgacgacaccgcccaggcacaggtgcatggggtcatgctgtgatggtttttcttcttcagcgactggtggggctatagtcatgtgtgccccttagtactaagtgatactggtgggttgcttttccccggtggccgtgtgcaagacggccaccggggttttccttcatgttcctgattttatctgcccggtgtggcgttttcatctttgtgtgggtggttcgcctggggtcttggagtgtggtgacgcggtgatggtcacggtgacggtgactgtggcgcgtggcgggtgaggtggttctttcctggtctggtgtgtggcccaggtgagtgtggtgatgagggccagggtgaggatgatgaccagggtggggagtagtttgtctggccggtgtcgccgggcttggtggcgcggcatgtttttccagggtgtgtctccgaacaggtcgtcgtcggaggggtcgtcgtggttcatagggtggccttggcgatggtggtgggcgagtttggtccaggtgatggtgccgtcggaggcgatgtggcggtcggcgggcagggtgtggacggtccatccggcgtcggtgagggcggtggtgaaggatttcttgatggatcgtttgggtaggtcgatgggggcgtgggtgccgacccagatgcaccggtttttgaggtgggtggcgccgaggtggttcatgtcgcggaccatgttttgggtgagtgtgagggtgtcggggtcccattggacggggatgatgatgtggtctgcgatggtgatggcgtgttgccaggcggcgtcgaggtcgttgtttccggtgtcgaggatgatgacgtggaagcggcttcttagggcggtgatgatgcggtcgaggtcgtcggcggtggggggtgtgatgaggctgttgtggttgtcggtgatggtgggtaggcatgtgatggtggcccagccttctggttgccaggagatgtaggggccgaggtcgcggggttgggaggcgaatcctgggtgacgggctgcgcgggcgaggtcgatgacggtgttgtcggtgtggcggggtgcgcgggtggagagggtgccgcgtgggttgatttccacgacgacgatgtcgtcgtgtcctgctgtggtggcgagggcttgggcaaggatgacggccagcggggttttgccggtgccgcctttgaggttggcgagggtgatgatgtggtcggtgagttgggcgggtgcggcggtgtggtgagggttggcggtgaggttggcgatggtgaacagggcatcgagatcgtcggtggtgttctgctcggtgggttgggggtcgccggagatgatcgggtcggcgcggcgcggctgccatgccggcctcaccactgtcacgaccaccacgggtctgctggcgctgtgtgggtgtcgtcggcgatgactcacgatcggcagtctcaccatcgtctcggtgatgctcggctagcgctggacccggtcaagttcgggccggctcacccagtggtgatgactcggtcacagaaccgctgccggtcgttatctcggacgtctcgactcctccagtcctgatgggcgttggagccacctacacctactctcagaacgaccccgacctcgtgtggggcgggggcagatgtcacttgggccaatcgagagcccaggtgatggggaaagcaggggtgtgatatctgtcctggaaaactgggcagctgctaccgtggattgacggatctccacgaaagaagggaatgcgaccatgcagatcaccgtcaagaccatcaaagatcatcgggttcgcactgtccagaccgccatgagcagcgccttggggattggttcccaggtagacatgctcgcccccggcggttccaccagctcgagttccggttcatgctgctcgtgctcgacctgcgcggtagtggcgcagcctcaagactgaacggctggtcagccccaggggcgtggcgctcatcgcgtcacgccccttctattcgctggacagggtgcgcgagctgaggaacatcgcggtgtgtgcgatgacgaggggcaggagcaagtctgtgcgggttgccaagtagccctgcgcgatggccatcacgctggccccgacggcggcgaagacacctccgatacgtcgcttcatgccgccgaattgcatcaggacgaataggactcccgcggtccacatccctccgggcatgcatctgggaaagatgaaccggaagatgatctcttcacaggagagctggagtactagcagcgtagcccccacggggagactcacctctactgacagacggatcgtcttcatccacccacccgagctggcatcgaccatttcggtggccatgcgcgaccggtggcctcgtgcctctcgctgcgtgtcgatccagccgagcagtccgtggacgctctccgctaggactcctgacgcgacagtctcaccaattcctaagcccacggcgaggaccgcgacgcccccctgcacggcaggctgtgtgacttggtggtcccaccaacccgccggcaggaccatgcgtgcgaggctgcacacgagcaggaggtggagggtcacgacgagcgacatctggaataccgcttgccgttcggcgatggtggcgttgggaaagagcggtaggccggcacgggcagcggcgctcgacagcttccgcaagagcggtttggagacgaagtagtaggcgacgtacagcgccagcgctgtcgcgatgatgatcatcggtctgccaccgagctgacccgccgatagccgtttctgttccaccaatactggctgttgtagatcaggtggcccagaacacaggcccagatcccccagaagatgaacaggatagtccccaaggcggcgagcgggatcttggagaggacctgtccccgtccgaacaccgagtggccgcaagcaaacaagagtgctcccacagcggtgagcgcgagccaggccggggttgctcgcagactgatcaccgggaccccgacccggaagccgacctcttctcctacagcgatgactagcaactgccacagcggcatgttctgaacggagcgcgcgactcgggctcgagtcacccacacgggctgttgagcgctcacatcaccactcaggtaccccggtgaggcacttcgcttagtactggggcccgatgtgcgagcattcgtgatgtgtcgcaggatccggttgtcaagccaagaggccagcagggctccggcgacagtgacgggtagcccgatcagcacgaggccccagccatgcggtgccgagaggtttctggccggcgtgcacgcgaggcaggcaaatgccatcactgccagcactacgacgtagatggtcgcataattcgacttgcgggtgacgttgccgaccatcttggccaaagtcgctggggaccagctgatgagtgcgatggtggtcagcaggaagcaggaccagacagacatccggcgcactcaggggtatgggtgcggctgtgggttttggaaaccgccatatgcggcgtagcgggggtgtgcccgcatgggtgcgctgggcagtgacagggcgagcagcccaggcgcccagagcctgacacagtgcagtcccagcccctggatctctatggtggtgaaatcttcgatgtacaggggtgacacacaggtgatgctgttgaccacgctctttaccagttccgcccccgtgtgggtgtcgtcaggtggcaggtcttcggcttgggcaatggtgcccgcgtcgaatttcgccacaactgattgcgcggcctgatagttcctcgcgtagtaggagacgttcgagtcgaggtcaagcatgtcctccgtggacatactggacgcgtcggcctcggcgtcgaaagacgtccataccgcgagcatccgaaccccgctgcactcgagaaacgccttgtacatggctgcttccagacccgcgtctgcacctaggccgacggcgacgaggggaagttggttgccactaccgaccatcatgcatgccacggtgaaatgcttgagcccgggagtcggaagccagtagaaacgcagttcgtggcttcggcccgctgcacgttccacgagccgctggatgcgctggaggcggggtccttcgacgcggatgcgcacaggtgacgaggctccataccacaggcccatcgcggcatctacctggatcaattcataagccgcggacagcgttgcggcgacgcgtgaagtgtggacggcggtgccggtcgtcacggccgttcccagccacggctcaccgtcgtgccgacgggggttgtaacccaggtaaaagaactgcgccgggatccactcctgccgggaggtcccgacacggggagtcttgacccatgtcatgggcaagtcgtcgcgataggtgtcgaacgcacctccagccactcgttgcgcgaagccgaatgcgcccagatcgagaacttcgtcctcggtccgggcgaggagttcctgacgagtcgcccagcgccgttcgaagggactatggagaatcccggtacccgcgcagtagcgctcgacggcctccgcgtagaccttgatctctgcctcaaactcgttcagccccaccccaccgatgtggtagctacccggcttggggtcgggccggtcaagcagtgcgtgcatccccgtgagttccccaccgttcacccgcacgcgggggccgagcgcggggtgcagcgagtagccgacggaagtcaccagcccgcatagcgggctgtaggtgcgccgcctgagccgggctgcggtctcgacggggtcgctatcctggcgaagcttcatcgctcgccccctgccgccagccactcacggatgtcgtagtacaggtccggagcggtttcaacctgcgctggtgcatcaaaacgggacataggtaggacgtcgttgtaggcgatctccatcgtcggtatgtagaccgacaacactttgttgcgcgtcgtgttgaggccgttgcgggcgatgctgacagcctcatgcgcgacgtgcgcggccaagatcgcgcgcaccgacgctgccacggccggcgctccggcccttacgcggtcggcagcggccacccgcatccaggacaggtagctctgccgttcgcgcaggttcatcgcgacccgctgctcgaaggtccggtaggacgaggtcgcaccagggacgacgtagggacccacgtacaaggccggcccgtctacagctgcgtggagccacgacaggtgggcgcgtcgggcgaacaggtcaagggcgcgcagcatagccgggttgttctgcgccagcgctaccacaaggagtggctgcaggtccggcgccgaacccagcaacgccaacatctgggaggcctcctgctccatgtgcaactcgtcggccgactgctcaagccgcaggcctgcgaagagggtggctgatggctgcgtgtcgtcagcgaggacggtagcctgcagcccctctccctcgagaatctgctggatatcgccggcgaggagcgcgtcgtcgctgaatacccacaccgggcgcgtctctctacctccatccatcttgtcctcaacgttttcgaccagcgcaccgatcgatgctaggtgggccatcacgtcgtcaagggccgcgcgggtcaatccgggcacccgggacacgatctcgggcggctgcagtccttggctcaacaagtccaaggccggccacagggtcccggtggcgtcgtcgtcctccagcgttgtgctctcggcgttccagacgcctcgacggaactccaccctgtccatcgagtaaggcaccatcatgaggcccggtgaaatgtggttggtcactttggctcctgtacagcctaggcttggacgcccacggtcatggtgtgggtcgcggtttggaaaatcccgtcgaggttgagtgcctgattgagttcgtcctcgtagaagcttgaggactcgactgaggcaagaccgagccccgtgcagaccaagttgatctgttgtgcgatcgccccgacttcttgaagggcgaacctcaaacccctggctccgtacttccgcatcgccctccacggcgagatgacgaacaccaagtgcactccggccgcatccgattgctccacggccggctcgccggccatcgaattcctcacgccgcgacagccctcttcaccggtcacgggcaccagtcgatcgatgaccggcgagtagcggtagacgccgcgactcaagccggacacccgttgtgcggacatgaagatagacacgggatacagccctccaccagacgggacagcgcgtacattataccgcacgatatcaccgctcgaacgtgggacatccacgtgccccgtcacaccggcagcacctctcagaaacgcagctacgtcacgcaggtctagggattcgccggtgtagttccgtccgctgcgccggcgggcgatcacttgctcgaggggtgcgcgcaccctgctggacctgggaagttcgatcacatcggcagcgaacgtgtcgcgatccatctgtccgtacgtaacgatcatggggtcaacgaaatagtcgccgaccgagacgttgaactccatatccccccgggcgatgcgcgaggcgagcaagaagtctgcagctgcgttagacagccccggcccatcagtgttgtcgcagcggaactcgtgggtccgaaaccccacaccttccgtgcccgggctctgcgctcgatacgacgtgatcgcagaactagccttccttaaaccgcccggagtagctaccatgaccgtcccctctgaggtctcccgaacacttgcgacaatagcagcatgtgggggcagccgccagaggcgggcatccttgtctcgacaaccattgacctccggattcgatatgtgcataatcatagtcgtgccaacacgaaacgtgtacgtctcggaagacgacctagacctgttcgccgaagccaccgagatcgctggaggcctgtccgcagcggtgttggaggccttgcgcagctacgtagacaggcaccatcgcgcggccggcggattcgacgagatcgagctggagctgcagaacgacggtatcgaccaccgtgtcaccttcatgggtcgccgcctgatacacatccgccgtccagatcccgagggaacccgcatagacactgtctacttgaccgccaaacaccaattcgccgttgccaccaaaatccaacgacggctgccagactggacggccggccacgagcacatctggtccgacccggagacctggaatcgggagttctggatcgcaggtgacaagacgatggccgtgtatcccagccttgacaaactccgcgaagctgaccccaatgtggccgaacgcgccgaggccgcggtcaaaatcccgccgttcgaggtcctggacatctgatgacagaatcatcatcttcccggcggcaattggcaatgccggtgctgtcagtcacggatctagccaagaaatacgtggttcatggcggctacgaggtcccggcactcaacggtgtctcgtttgacctgcacccgggagagatgctgggtttgttcgggccaaacggtgctggaaagacgacgctggtcaggatcatcgcgggcctcttatcggcagattctggagacgtccactggggatcggatcaaggtcgggccaggttaggctacgtgtcccaaaagggtggactgcagtacgggctcacgtgccgggaagagatggtcttccacgcacaatgcttcggccagtccgccaagcaggcccggactagcgtcgacgaggtcgccgcgatgctgcactgcgattacctgatggagtgggacgtcggaaggctctccggtgggcaacgccgaatcatcgaggtagggctagcactcgtcaatcaaccatcggtcgtcctgctcgacgagcccaccctgggcctggaccccgcaacacgcctgtcgttgtggcaaacggtaaagtcggcacgccgtgagaccggtgctgccttcctcgtcaccacccactacattgacgaggtggccgagcacctgtccaacgtcagcgtgatcaaccacggaaccgtcgtcgccaacggctcgccagcgcacatccgagaaatgttcgcgaccggggaagtaacgctcggcgtggccgaggatacggtggacagtgcggtggacgtgttggctgggaccgcgttcgaggcgcaccccaccgaaaccgtcccggggatcgtggtcaggtccaggcatcccgacgtggacgcggccaagatcatcaccatcctggctggtcatggcatctcggtggactccatatccgtacgcgaggcgaccttggaagaggcgtttctcacgatcacaggcagtcgagacccggagaggcaaatcccatgaacacttgcttcaggcgatatgcggcgatgtcgctgagagcgcggcgtgatttggccctgacattcatccagcccctcgtctacctagccctcttcggaccgctcttcgtcacgacgatgaagatgtcgcagagagctaccgccgctacgggttactccctatacatcacgggcctgtccatccaaatggccatgacgatcggtgccttcgcggggctaaccatcatcctcgaataccgactcggcatcctcgaacggatctggagcacccccctcacggggagcaagatgatggcggggcgaatcgcgcgcgacgtcgttatgatgatgatgccgatactggtcgtcttcatcatcggcctggtgctgggaacacgccccagcccactgggcctggcgacctacttcgtgacagtgctcggcacaggagccacgttcgccggggtctcctacgcggtggcactcagaacgaagagcgaggcagcgctatccgcgatcttcaacctcatcctgctacccatcctcctgctgtcggggatcatgctgcccatgtcgttcgcaccacactggatcgccaccgctgcccacgtgaacccgttgtggtacctggtgcaaggcgcgcggaaccagttcagcgttctagggctcgtggcggcggccccatggagttgggctgtggccatcgtcatgtcagccgctgccttcggctgggcaagccacgaattcaacaagaggcgctgacacaaagaatggtgccgggaacccaggtccccggcaccaccgagtgcactcgcgacgtcaacgcaccgttgcggtcactgcgcaggtcgagcacgaggacgacgagcccgcgctgctgcaggtcgagccgccaggcgcgagcaggtcgacgttagcgtcggcgccgccgaagacggacgtgacggccggctgagaggtgcggatgcggtgctccagcgaggaggtggtggtgagtttcatgggaggtgctcctaggagtgagacgagaacaaaccctagcgataggttagcagtccgcaaccgactccgggaatagtagaagcgcgcatccgtagcggaagaccttagcctgattacagtgaccctgttcgcgtctcaacattattccacacccccgagcagcgaacgacaccgcgatgatgatccgtcgcctctccaccgaagaactccgcgcccacatcgcaccgggccgccgtcccgtgcatcagacctgccgtcaacgtcggccatgaagctgggaaggtggctctcgtctaggagcagacgcgggacgcctcctccaggttgggccggggaagtgtccggttcttgatgtaggtggcggtccctattgatgggcgttgaccgtgggaatgcggtcggcgaagggggtggcgaacccgttgagcgcaggcttccagcgcatgcatcaacgctgtctgccggccaccggcaagcctcacccgcccgtcatggccatcatcgaggtgccggtgaatcctcgacacatgatcccaactcccccggaggggcttccggggctgttcagccaccagatcagccaggcggcgagcccgactctgccacccggaccctgcagagcgtgcctgctgccgtcgtgtcgtgtcgggccagtgggccaccagatcggccacatccgtcttggcccatct

SEQ ID NO: 114 - DNA, 16491 bp, Propionibacterium acnes
  source 1..16491: mol_type = genomic DNA
gtgttccagtgcctcgcgggcgtgatgttcttcttcggcaccttcttgccacatgcttcgcgcttcagcctcgccatccaagcgaacctggactgtgaacgagtcctcatcgggtccgtcctcattccacgcggcaatgatcccacgggcctcgtctgcgacctgactcaacttcatcgcctgcccgacagccccgagagccggaatctcgaacacccagatattcgcctcagccgagacctcacgatgggcgatcacttcgtaggtcgtctcaccttctactgtcgtgtccattacttccactccttcggaattttcacgcctgctcgctccagctgtgccaggacaccaactgacgtcagctggtgtcctgctggtatcgatacgcgcccggctccgccggggcgtccccagatttcatggcttcccttggcgttccgcagacgggcccatccttgagaacggagcagcttgaggacgtccttagttttctgcggtttcacacatcatagtatagccccacttaacttgtaaactaagcccctgtttacattttagttggtgcatgtgatccctgctcttatgacgtcgcccgacctggcgccttagacatgcactgttcatcctcaaccacactcaccgtcacgggtccgaaggcgaggtctatcaccattcgcatcgatgaagttgaagcaggatcgtccgcatcacgcactgccgatccggacagacgccaccggccgtaccgactgtttacgatctgccaccgcagactgctgccataaccgctatcacctctgatagtacttttagtactatcagaggtgattcaagattctcctgtcgagcagccctacagtcacgaagtcctgcgatcgtcatcgcttaaggcagacggatggccatcggggaccactcgcaaagcaggggcgatcagcaacagtgatgtgccatgagcaagtactggtgcaccggctgtttactccgcccctagataaaccacgggtgcaggggtggacaccacaccatgaccgatgtggtgcccaccccatggctcacaggcaggccctatcgccgggagcactgctgcagatgaggctcagtaacctgccatgtctcacctggggccaaggtgccaagctccccacggaatctcaggcatcggaaaccagcagccgaacttccacagcatgagcgccctacgaaaaagcaggccgccgacggttctcaagaactcgccggcggcctgcatcgccactcgaactgtaaccgtggtccgaccccgtgcacaggtaagctccacactcccaccaggcatggccgaggcagtaccaagttgccgtggcccatcggcagatttggttaaattttgaaaagtcatatagactccttctgtaaatttttaaatctcataggactctcgccatcgccagccagcttcgacaggagtcccgatgtttcaccgagtgaaatatcggcaccgtttgagttgacctaaagctcaaaagatgctagaatccatcttaccccgttaggggcgttttgtcaaacgcccctatattgcgtgtcttcgcgcgtcgtagcgctgatgctgcgcctgtgtcgactatccgtttgtaagtactttcgatgacaccagcagtggctactcatgactggtgcgtgcgggtctaaagcagcagggaaaggaatcgcagtagaagccgcttgattcctatcacccctgatggtactatcagtactaacagagcagggcttactcgatgcgtgagaatcggggacatgctgagcctctcgtaggtcattggcctgctgggcgtcagtgtggcgcggttcgatccagtgaactctatcagctctgttagtactgtcagagttgatatattcgaccccaggaggagcccatgagttacatcgttcgcaccggaaatttggtcgacacccccgagctgcgtgagggagagcatggcccgtacacctacgctcgcgtcatcgtgtccgatcgcattcgccaggaggacggcagctacgtcaacgggccagcgatcgcctacgacgtcttggcgggtggcagccaagccgtgaatctggttgaagccgccaaggcgagcggcaacatccgcatcatgttcgcgggccgttaccgcgtcaccgagtggcggggtgagcagggcactcgtatccagcatgaggtccgagccgacgaagtgagcgtgagcctgctcggtcagagggtgaccgtggagcggcctcgaggtgacgtggcatccaaggagagcacgtcgttctgattgagtccgggggcacggtggtcgccgtggtaaaccgtgcccctgacagtactattgacactattggaggtatcagtgtgactgctcaaattttcgccttgtgcaaccagaagggtggcgtcggaaagtcgacatcgacgtttcatctggcccgtgccgcggtgttgcgtggccagcgtgtgcttgtcgtcgacaacgacccccagggcaacctgacgtctgtcgcggccgccgagcccgtgggggaggatcaggcggggctggccgatgtgctcagcgcgcgtgctccagagaccctccgcgatgtgatcgtgccgggaatctggtctggcctcgatgtcgtgccgacgtctggcatcacgctcggctgggtgcgtgacgaactcgtgatcgccggtgccggccgagaaggccggctgcgggaggccctggccggcgtcgaggacgactacgacgtgatcctgatcgactgtgctccatcgctcgatcagctcacgatcaacggcctggtggccgcccagggtgtcatcgtcgtgacgcactcgaagttgtggagcgccaacggcctcgcccagctgctcgacaccatcgacagcgtgcgcagctactacaacggcgcgctgcgcgtggcgggcatcatcgtcaaccagcacgaggagaacaccatcagcgggaaaacctggctcgacgagctgcatcaggctgccgagtcccggaagctgaccgtgcttgacccgccgatccccaagcgtgtcgtcatcgccgataccgtcgaggccgcgcgcggtctcgacgagtggggaagtgccgaggcggccgcgctcggccagttgtacgcccaccacctgacctgcatcgaaggagccctgtgatgacccgtccagccccccgaaagtcctcattgagcggatcaactccggtcgccccgccggctcagacggcgccggcaccgtctgccgcacctaccccccacaaggccgatgagtcacagacgagcagcaccacgaggaagtggcggcacaaggtgtcgttctaccaggacccggccgacaccgaccgggtgcgcggggcgatcctttacacgatgacgaccgagggcaaccggaacctgagccagttcgtcaacgatgccgtcatggccaaggtggtcgagctggaagtcaagtacaacgatggccagccattccccgctgtgggagcccgaggactaccccagggcggtgcagccgccgccggtgagtagaggaccatcgaccgtcgggggcttcaccatgcccccgaccctcggtcatcctgatcctcttgtcgatggtggtgacagtgggggattcacgcctcgttcagatcagaggaagtctcaccgcgtgattagtactatcaaatctgacagtactaacagagcagatagggttccctaggtcgagctgtatcacgccgacaaccagtgagccagtgatctacgaggggcgcaatatgcacccgatcggtagccgcgaaggcctcgccctgccccgatagtactatcaccactatcaatggtgctagtggtgagtttcttccattgatgacaacagcacagtgctgccgtctgtgtgcgggccaccagcccgcacacagttgccgtcgaggacgttgttcatgctctgtggtggccggtcctgagggcggctcgcaggatctcccggcgctcacggcgacgagcctggtagccaaggtctgcatgttcggcggcgagacgggctttgagggttgcggcttctgcacggcggtggagttggtcgtcgatgagttgggcgcgggccagacgccgcttatgggggttgtcgtgggtgaggggggcgtcgaggctgccgtcgtgggttagggccagggctgctcgttcggcgtcgtcgaggccgatgtggtggacggtcacgggtgcggtggtgacgtcgaggatgtccaggtggatgttgtggccgccgccgggggcttcggggaagtctggtgggctggcctggccggtgtcggggtcataccaggacaggccgatgatctcggcccagggtgggggcgggcagacggctcgcagaagggtgtgggccaggaacgtgttgcgggccatgatgcctccaagggtgaaaagcagtcgagtagcgatgacggcggggtagccgtctgctgggctgaggccgaccgggcccatgtcctcgatgctcttgtgctgcggccataccccaaagctaccaaacagtctttttaatctcaaagatacaaacagtgcttgacatattatctgcagcgaaagatactttcatcatggtggctgatcatgattacgcgactcctgacgatgagtggatgacacctcctcaggtggcccgtgtgattccgaacaccactgctcaggctgtccggcgctgggctgaggagggtcagcttcctggggcgtttcgtactccttctgggcgttggcatattccgtggtcggctgtggtgggcatcatggggtttgatccgcgtgagtccgcatcaccgagtgatcgtcaccagagctgacagagtcgtcgatgagctttcgagtgcagagctgatggcacgacggtctggatacttgtggagatgagagacgaccacatccagtcatggtcggggtacaccgaggggcagattcagcagtgctggcacgatgaggttgcccctgccattgactcgctcatggagcaggtaaggtctgttgccgagactcctgtgccgccgggttcgagattttacggcgatgagcagtgggccaagccttttcatccgtctactgcgatctgcggttcaatgggtccgccagcgatcacttgcacgcgctgaagctcctcgtctgggaagcgaacgtccaccatgtctatgcgccgtacacccttgctcgtgcatctattgaggcatcgtctactgctgtgtggctgttgagcacgaagacgcgcggagaacgtgtgctgcgagccttgcgatggtacgcgcaggattgtcacgactcgtgcaggttcatggatgatgagcagtatcgtgaccacctattgcggcgcattgaggggactgtcgctgcgggaaatctcgactcgcgcgctgctaggaaacggtaccgtgcaaccgatgttgtcgatgaggctgatcagctggttcccggaactctgagggcgtggcgagctttttctggtatggcccattcccgtatgtgggcatccagggggctgctcgacatggaagtgctgtccagtggccaaggaatggttacggcgaaggtgacgagcggatcggcccaaatcctttgggccgtcgtggcagctctgaatgttgctctcagtgccgctcgcttgtggcgtgattcgatgtgctcaccgtttgctgttgcccagtcggtagacgcgatgccagaggcgtttcgccgccctgtttagggtctgatcggggtagtgggtgttcacggggtcccaggttggccatggggcggcttggtgatgtgagttgggttgtgtggcagcctgggtgttgggtgtggcttcgttggccacgaaggcatgctcttccttgtgctgggacttgagtccccagtgctctcccctttgctagtggggggtggggtccccggaggtaggtcctccggggactttttctatgtctgtccgtgccccaggatttcgtatctaggcagtaccaattttgggttagttggaggtttctttggtaatggacagggtgagggtgatgaagaggtggccgtccttggtggcagaaattttctcgaacttcagctgaatgttgttatcagccactatctgttgggcggtgaggtgctcggagagcttctggaatccttcgcggatccacaggttgtaggggttggtgaccgagaccgaagggtatgggtcgaccttcagcgtcaggactggctggtctgggttgagggagttgatcttcaccagtttggggtaccggtcgcactcatgtgtctcttgtgttgggggccagcagtcgggggcccattcctcccagtggtcacgcatctcacgaagtactttcctgcatctcagcctctgcaggagctcgcgcgccaccgatgggagggctgccatgatgagggcaaggactgcgaacccgatgatgtaattgaccgtgtccctcgtcacgccgttcttgccgaggattccgatggcgaacgcgatgacgacaccgcccaggcacaggtgcatggggtcatgctgtgatggtttttcttcttcagcgactggtggggctatagtcatgtgtgccccttagtactaagtgatactggtgggttgcttttccccggtggccgtgtgcaagacggccaccggggttttccttcatgttcctgattttatctgcccggtgtggcgttttcatctttgtgtgggtggttcgcctggggtcttggagtgtggtgacgcggtgatggtcacggtgacggtgactgtggcgcgtggcgggtgaggtggttctttcctggtctggtgtgtggcccaggtgagtgtggtgatgagggccagggtgaggatgatgaccagggtggggagtagtttgtctggccggtgtcgccgggcttggtggcgcggcatgtttttccagggtgtgtctccgaacaggtcgtcgtcggaggggtcgtcgtggttcatagggtggccttggcgatggtggtgggcgagtttggtccaggtgatggtgccgtcggaggcgatgtggcggtcggcgggcagggtgtggacggtccatccggcgtcggtgagggcggtggtgaaggatttcttgatggatcgtttgggtaggtcgatgggggcgtgggtgccgacccagatgcaccggtttttgaggtgggtggcgccgaggtggttcatgtcgcggaccatgttttgggtgagtgtgagggtgtcggggtcccattggacggggatgatgatgtggtctgcgatggtgatggcgtgttgccaggcggcgtcgaggtcgttgtttccggtgtcgaggatgatgacgtggaagcggcttcttagggcggtgatgatgcggtcgaggtcgtcggcggtggggggtgtgatgaggctgttgtggttgtcggtgatggtgggtaggcatgtgatggtggcccagccttctggttgccaggagatgtaggggtcgaggtcgcggggttgggaggcgaatcctgggtgacgggctgcgcgggcgaggtcgatgacggtgttgtcggtgtggcggggtgcgcgggtggagagggtgccgcgtgggttgatttccacgacgacgatgtcgtcgtgtcctgctgtggtggcgagggcttgggcaaggatgacggccagcggggttttgccggtgccgcctttgaggttggcgagggtgatgatgtggtcggtgagttgggcgggtgcggcggtgtggtgagggttggcggtgaggttggcgatggtgaacagggcatcgagatcgtcggtggtgttctgctcggtgggttgggggtcgccggagatgatcgggtcggcgcggcgcggctgccatgccggcctcaccactgtcacgaccaccacgggtctgctggcgctgtgtgggtgtcgtcggcgatgactcacgatcggcagtctcaccatcgtctcggtgatgctcggctagcgctggacccggtcaagttcgggccggctcacccagtggtgatgactcggtcacagaaccgctgccggtcgttatctcggacgtctcgactcctccagtcctgatgggcgttggagccacctacacctactctcagaacgaccccgacctcgtgtggggcgggggcagatgtcacttgggccaatcgagagcccaggtgatggggaaagcagggtgtgatatctgtcctggaaaactgggcagctgctaccgtggattgacggatctccacgaaagaagggaatgcgaccatgcagatcaccgtcaagaccatcaaagatcatcgggttcgcactgtccagaccgccatgagcagcgccttggggattggttcccaggtagacatgctcgcccccggcggttccaccagctcgagttccggttcatgctgctcgtgctcgacctgcgcggtagtggcgcagcctcaagactgaacggctggtcagccccaggggcgtggcgctcatcgcgtcacgccccttctattcgctggacagggtgcgcgagctgaggaacatcgcggtgtgtgcgatgacgaggggcaggagcaagtctgtgcgggttgccaagtagccctgcgcgatggccatcacgctggccccgacggcggcgaagacacctccgatacgtcgcttcatgccgccgaattgcatcaggacgaataggactcccgcggtccacatccctccgggcatgcatctgggaaagatgaaccggaagatgatctcttcacaggagagctggagtactagcagcgtagcccccacggggagactcacctctactgacagacggatcgtcttcatccacccacccgagctggcatcgaccatttcggtggccatgcgcgaccggtggcctcgtgcctctcgctgcgtgtcgatccagccgagcagtccgtggacgctctccgctaggactcctgacgcgacagtctcaccaattcctaagcccacggcgaggaccgcgacgcccccctgcacggcaggctgtgtgacttggtggtcccaccaacccgccggcaggaccatgcgtgcgaggctgcacacgagcaggaggtggagggtcacgacgagcgacatctggaataccgcttgccgttcggcgatggtggcgttgggaaagagcggtaggccggcacgggcagcggcgctcgacagcttccgcaagagcggtttggagacgaagtagtaggcgacgtacagcgccagcgctgtcgcgatgatgatcatcggtctgccaccgagctgacccgccgatagccgtttctgttccaccaatactggctgttgtagatcaggtggcccagaacacaggcccagatcccccagaagatgaacaggatagtccccaaggcggcgagcgggatcttggagaggacctgtccccgtccgaacaccgagtggccgcaagcaaacaagagtgctcccacagcggtgagcgcgagccaggccggggttgctcgcagactgatcaccgggaccccgacccggaagccgacctcttctcctacagcgatgactagcaactgccacagcggcatgttctgaacggagcgcgcgactcgggctcgagtcacccacacgggctgttgagcgctcacatcaccactcaggtaccccggtgaggcacttcgcttagtactggggcccgatgtgcgagcattcgtgatgtgtcgcaggatccggttgtcaagccaagaggccagcagggctccggcgacagtgacgggtagcccgatcagcacgaggccccagccatgcggtgccgagaggtttctggccggcgtgcacgcgaggcaggcaagtgccaacactgccagcactacgacgtagatggtcgcataattcgacttgcgggtgacgttgccgaccatcttggccaaagtcgctggggaccagctgatgagtgcgatggtggtcagcaggaagcaggaccagacagacatccggcgcactcaggggtatgggtgcggctgtgggttttggaaaccgccatatgcggcgtagcgggggtgtgcccgcatgggtgcgctgggcagtgacagggcgagcagcccaggcgcccagagcctgacacagtgcagtcccagcccctggatctctatggtggtgaaatcttcgatgtacaggggtgacacacaggtgatgctgttgaccacgctctttaccagttccgcccccgtgtgggtgtcgtcaggtggcaggtcttcggcttgggcaatggtgcccgcgtcgaatttcgccacaactgattgcgcggcctgatagttcctcgcgtagtaggagacgttcgagtcgaggtcaagcatgtcctccgtggacatactggacgcgtcggcctcggcgtcgaaagacgtccataccgcgagcatccgaaccccgctgcactcgagaaacgccttgtacatggctgcttccagacccgcgtctgcacctaggccgacggcgacgaggggaagttggttgccactaccgaccatcatgcatgccacggtgaaatgcttgagcccgggagtcggaagccagtagaaacgcagttcgtggcttcggcccgctgcacgttccacgagccgctggatgcgctggaggcggggtccttcgacgcggatgcgcacaggtgacgaggctccataccacaggcccatcgcggcatctacctggatcaattcataagccgcggacagcgttgcggcgacgcgtgaagtgtggacggcggtgccggtcgtcacggccgttcccagccacggctcaccgtcgtgccgacgggggttgtaacccaggtaaaagaactgcgccgggatccactcctgccgggaggtcccgacacggggagtcttgacccatgtcatgggcaagtcgtcgcgataggtgtcgaacgcacctccagccactcgttgcgcgaagccgaatgcgcccagatcgagaacttcgtcctcggtccgggcgaggagttcctgacgagtcgcccagcgccgttcgaagggactatggagaatcccggtacccgcgcagtagcgctcgacggcctccgcgtagaccttgatctctgcctcaaactcgttcagccccaccccaccgatgtggtagctacccggcttggggtcgggccggtcaagcagtgcgtgcatccccgtgagttccccaccgttcacccgcacgcgggggccgagcgcggggtgcagcgagtagccgacggaagtcaccagcccgcatagcgggctgtaggtgcgccgcctgagccgggctgcggtctcgacggggtcgctatcctggcgaagcttcatcgctcgccccctgccgccagccactcacggatgtcgtagtacaggtccggagcggtttcaacctgcgctggtgcatcaaaacgggacataggtaggacgtcgttgtaggcgatctccatcgtcggtatgtagaccgacaacactttgttgcgcgtcgtgttgaggccgttgcgggcgatgctgacagcctcatgcgcgacgtgcgcggccaagatcgcgcgcaccgacgctgccacggccggcgctccggcccttacgcggtcggcagcggccacccgcatccaggacaggtagctctgccgttcgcgcaggttcatcgcgacccgctgctcgaaggtccggtaggacgaggtcgcaccagggacgacgtagggacccacgtacaaggccggcccgtctacagctgcgtggagccacgacaggtgggcgcgtcgggcgaacaggtcaagggcgcgcagcatagccgggttgttctgcgccagcgctaccacaaggagtggctgcaggtccggcgccgaacccagcaacgccaacatctgggaggcctcctgctccatgtgcaactcgtcggccgactgctcaagccgcaggcctgcgaagagggtggctgatggctgcgtgtcgtcagcgaggacggtagcctgcagcccctctccctcgagaatctgctggatatcgccggcgaggagcgcgtcgtcgctgaatacccacaccgggcgcgtctctctacctccatccatcttgtcctcaacgttttcgaccagcgcaccgatcgatgctaggtgggccatcacgtcgtcaagggccgcgcgggtcaatccgggcacccgggacacgatctcgggcggctgcagtccttggctcaacaagtccaaggccggccacagggtcccggtggcgtcgtcgtcctccagcgttgtgctctcggcgttccagacgcctcgacggaactccaccctgtccatcgagtaaggcaccatcatgaggcccggtgaaatgtggttggtcactttggctcctgtacagcctaggcttggacgcccacggtcatggtgtgggtcgcggtttggaaaatcccgtcgaggttgagtgcctgattgagttcgtcctcgtagaagcttgaggactcgactgaggcaagaccgagccccgtgcagaccaagttgatctgttgtgcgatcgccccgacttcttgaagggcgaacctcaaacccctggctccgtacttccgcatcgccctccacggcgagatgacgaacaccaagtgcactccggccgcatccgattgctccacggccggctcgccggccatcgaattcctcacgccgcgacagccctcttcaccggtcacgggcaccagtcgatcgatgaccggcgagtagcggtagacgccgcgactcaagccggacacccgttgtgcggacatgaagatagacacgggatacagccctccaccagacgggacagcgcgtacattataccgcacgatatcaccgctcgaacgtgggacatccacgtgccccgtcacaccggcagcacctctcagaaacgcagctacgtcacgcaggtctagggattcgccggtgtagttccgtccgctgcgccggcgggcgatcacttgctcgaggggtgcgcgcaccctgctggacctgggaagttcgatcacatcggcagcgaacgtgtcgcgatccatctgtccgtacgtaacgatcatggggtcaacgaaatagtcgccgaccgagacgttgaactccatatccccccgggcgatgcgcgaggcgagcaagaagtctgcagctgcgttagacagccccggcccatcagtgttgtcgcagcggaactcgtgggtccgaaaccccacaccttccgtgcccgggctctgcgctcgatacgacgtgatcgcagaactagccttccttaaaccgcccggagtagctaccatgaccgtcccctctgaggtctcccgaacacttgcgacaatagcagcatgtgggggcagccgccagaggcgggcatccttgtctcgacaaccattgacctccggattcgatatgtgcataatcatagtcgtgccaacacgaaacgtgtacgtctcggaagacgacctagacctgttcgccgaagccaccgagatcgctggaggcctgtccgcagcggtgttggaggccttgcgcagctacgtagacaggcaccatcgcgcggccggcggattcgacgagatcgagctggagctgcagaacgacggtatcgaccaccgtgtcaccttcatgggtcgccgcctgatacacatccgccgtccagatcccgagggaacccgcatagacactgtctacttgaccgccaaacaccaattcgccgttgccaccaaaatccaacgacggctgccagactggacgaccggccacgagcacatctggtccgacccggagacctggaatcgggagttctggatcgcaggtgacaagacgatggccgtgtatcccagccttgacaaactccgcgaagctgaccccaatgtggccgaacgcgccgaggccgcggtcaaaatcccgccgttcgaggtcctggacatctgatgacagaatcatcatcttcccggcggcaattggcaatgccggtgctgtcagtcacggatctagccaagaaatacgtggttcatggcggctacgaggtcccggcactcaacggtgtctcgtttgacctgcacccgggagagatgctgggtttgttcgggccaaacggtgctggaaagacgacgctggtcaggatcatcgcgggcctcttatcggcagattctggagacgtccactggggatcggatcaaggtcgggccaggttaggctacgtgtcccaaaagggtggactgcagtacgggctcacgtgccgggaagagatggtcttccacgcacaatgcttcggccagtccgccaagcaggcccggactagcgtcgacgaggtcgccgcgatgctgcactgcgattacctgatggagtgggacgtcggaaggctctccggtgggcaacgccgaatcatcgaggtagggctagcactcgtcaatcaaccatcggtcgtcctgctcgacgagcccaccctgggcctggaccccgcaacacgcctgtcgttgtggcaaacggtaaagtcggcacgccgtgagaccggtgctgccttcctcgtcaccacccactacattgacgaggtggccgagcacctgtccaacgtcagcgtgatcaaccacggaaccgtcgtcgccaacggctcgccagcgcacatccgagaaatgttcgcgaccggggaagtaacgctcggcgtggccgaggatacggtggacagtgcggtggacgtgttggctgggaccgcgttcgaggcgcaccccaccgaaaccgtcccggggatcgtggtcaggtccaggcatcccgacgtggacgcggccaagatcatcaccatcctggctggtcatggcatctcggtggactccatatccgtacgcgaggcgaccttggaagaggcgtttctcacgatcacaggcagtcgagacccggagaggcaaatcccatgaacacttgcttcaggcgatatgcggcgatgtcgctgagagcgcggcgtgatttggccctgacattcatccagcccctcgtctacctagccctcttcggaccgctcttcgtcacgacgatgaagatgtcgcagagagctaccgccgctacgggttactccctatacatcacgggcctgtccatccaaatggccatgacgatcggtgccttcgcggggctaaccatcatcctcgaataccgactcggcatcctcgaacggatctggagcacccccctcacggggagcaagatgatggcggggcgaatcgcgcgcgacgtcgttatgatgatgatgccgatactggtcgtcttcatcatcggcctggtgctgggaacacgccccagcccactgggcctggcgacctacttcgtgacagtgctcggcacaggagccacgttcgccggggtctcctacgcggtggcactcagaacgaagagcgaggcagcgctatccgcgatcttcaacctcatcctgctacccatcctcctgctgtcggggatcatgctgcccatgtcgttcgcaccacactggatcgccaccgctgcccacgtgaacccgttgtggtacctggtgcaaggcgcgcggaaccagttcagcgttctagggctcgtggcggcggccccatggagttgggctgtggccatcgtcatgtcagccgctgccttcggctgggcaagccacgaattcaacaagaggcgctgacacaaagaatggtgccgggaacccaggtccccggcaccaccgagtgcactcgcgacgtcaacgcaccgttgcggtcactgcgcaggtcgagcacgaggacgacgagcccgcgctgctgcaggtcgagccgccaggcgcgagcaggtcgacgttagcgtcggcgccgccgaagacggacgtgacggccggctgagaggtgcggatgcggtgctccagcgaggaggtggtggtgagtttcatgggaggtgctcctaggagtgagacgagaacaaaccctagcgataggttagcagtccgcaaccgactccgggaatagtagaagcgcgcatccgtagcggaagaccttagcctgattacagtgaccctgttcgcgtctcaacattattccacacccccgagcagcgaacgacaccgcgatgatgatccgtcgcctctccaccgaagaactccgcgcccacatcgcaccgggccgccgtcccgtgcatcagacctgccgtcaacgtcggccatgaagctgggaaggtggctctcgtctaggagcagacgcgggacgcctcctccaggttgggccggggaagtgtccggttcttgatgtaggtggcggtccctattgatgggcgttgaccgtgggaatgcggtcggcgaagggggtggcgaacccgttgagcgcaggcttccagcgcatgcatcaacgctgtctgccggccaccggcaagcctcacccgcccgtcatggccatcatcgaggtgccggtgaatcctcgacacatgatcccaactcccccggaggggcttccggggctgttcagccaccagatcagccaggcggcgagcccgactctgccacccggaccctgcagagcgtgcctgctgccgtcgtgtcgtgtcgggccagtgggccaccagatcggccacatccgtcttggcccat

SEQ ID NO: 115 - DNA, 13424 bp, Propionibacterium acnes
  source 1..13424: mol_type = genomic DNA
ccgcgcggggtctcgacgagtggggaagtgccgaggcggccgcgctcggccagttgtacgcccaccacctgacctgcatcgaaggagccctgtgatgacccgtccagccccccgaaagtcctcattgagcggatcaactccggtcgccccgccggctcagacggcgccggcaccgtctgccgcacctaccccccacaaggccgatgagtcacagacgagcagcaccacgaggaagtggcggcacaaggtgtcgttctaccaggacccggccgacaccgaccgggtgcgcggggcgatcctttacacgatgacgaccgagggcaaccggaacctgagccagttcgtcaacgatgccgtcatggccaaggtggtcgagctggaagtcaagtacaacgatggccagccattccccgctgtgggagcccgaggactaccccagggcggtgcagccgccgccggtgagtagaggaccatcgaccgtcgggggcttcaccatgcccccgaccctcggtcatcctgatcctcttgtcgatggtggtgacagtgggggattcacgcctcgttcagatcagaggaagtctcaccgcgtgattagtactatcaaatctgacagtactaacagagcagatagggttccctaggtcgagctgtatcacgccgacaaccagtgagccagtgatctacgaggggcgcaatatgcacccgatcggtagccgcgaaggcctcgccctgccccgatagtactatcaccactatcaatggtgctagtggtgagtttcttccattgatgacaacagcacagtgctgccgtctgtgtgcgggccaccagcccgcacacagttgccgtcgaggacgttgttcatgctctgtggtggccggtcctgagggcggctcgcaggatctcccggcgctcacggcgacgagcctggtagccaaggtctgcatgttcggcggcgagacgggctttgagggttgcggcttctgcacggcggtggagttggtcgtcgatgagttgggcgcgggccagacgccgcttatgggggttgtcgtgggtgaggggggcgtcgaggctgccgtcgtgggttagggccagggctgctcgttcggcgtcgtcgaggccgatgtggtggacggtcacgggtgcggtggtgacgtcgaggatgtccaggtggatgttgtggccgccgccgggggcttcggggaagtctggtgggctggcctggccggtgtcggggtcataccaggacaggccgatgatctcggcccagggtgggggcgggcagacggctcgcagaagggtgtgggccaggaacgtgttgcgggccatgatgcctccaagggtgaaaagcagtcgagtagcgatgacggcggggtagccgtctgctgggctgaggccgaccgggcccatgtcctcgatgctcttgtgctgcggccataccccaaagctaccaaacagtctttttaatctcaaagatacaaacagtgcttgacatattatctgcagcgaaagatactttcatcatggtggctgatcatgattacgcgactcctgacgatgagtggatgacacctcctcaggtggcccgtgtgattccgaacaccactgctcaggctgtccggcgctgggctgaggagggtcagcttcctggggcgtttcgtactccttctgggcgttggcatattccgtggtcggctgtggtgggcatcatggggtttgatccgcgtgagtccgcatcaccgagtgatcgtcaccagagctgacagagtcgtcgatgagctttcgagtgcagagctgatggcacgacggtctggatacttgtggagatgagagacgaccacatccagtcatggtcggggtacaccgaggggcagattcagcagtgctggcacgatgaggttgcccctgccattgactcgctcatggagcaggtaaggtctgttgccgagactcctgtgccgccgggttcgagattttacggcgatgagcagtgggccaagccttttcatccgtctactgcgatctgcggttcaatgggtccgccagcgatcacttgcacgcgctgaagctcctcgtctgggaagcgaacgtccaccatgtctatgcgccgtacacccttgctcgtgcatctattgaggcatcgtctactgctgtgtggctgttgagcacgaagacgcgcggagaacgtgtgctgcgagccttgcgatggtacgcgcaggattgtcacgactcgtgcaggttcatggatgatgagcagtatcgtgaccacctattgcggcgcattgaggggactgtcgctgcgggaaatctcgactcgcgcgctgctaggaaacggtaccgtgcaaccgatgttgtcgatgaggctgatcagctggttcccggaactctgagggcgtggcgagctttttctggtatggcccattcccgtatgtgggcatccagggggctgctcgacatggaagtgctgtccagtggccaaggaatggttacggcgaaggtgacgagcggatcggcccaaatcctttgggccgtcgtggcagctctgaatgttgctctcagtgccgctcgcttgtggcgtgattcgatgtgctcaccgtttgctgttgcccagtcggtagacgcgatgccagaggcgtttcgccgccctgtttagggtctgatcggggtagtgggtgttcacggggtcccaggttggccatggggcggcttggtgatgtgagttgggttgtgtggcagcctgggtgttgggtgtggcttcgttggccacgaaggcatgctcttccttgtgctgggacttgagtccccagtgctctcccctttgctagtggggggtggggtccccggaggtaggtcctccggggactttttctatgtctgtccgtgccccaggatttcgtatctaggcagtaccaattttgggttagttggaggtttctttggtaatggacagggtgagggtgatgaagaggtggccgtccttggtggcagaaattttctcgaacttcagctgaatgttgttatcagccactatctgttgggcggtgaggtgctcggagagcttctggaatccttcgcggatccacaggttgtaggggttggtgaccgagaccgaagggtatgggtcgaccttcagcgtcaggactggctggtctgggttgagggagttgatcttcaccagtttggggtaccggtcgcactcatgtgtctcttgtgttgggggccagcagtcgggggcccattcctcccagtggtcacgcatctcacgaagtactttcctgcatctcagcctctgcaggagctcgcgcgccaccgatgggagggctgccatgatgagggcaaggactgcgaacccgatgatgtaattgaccgtgtccctcgtcacgccgttcttgccgaggattccgatggcgaacgcgatgacgacaccgcccaggcacaggtgcatggggtcatgctgtgatggtttttcttcttcagcgactggtggggctatagtcatgtgtgccccttagtactaagtgatactggtgggttgcttttccccggtggccgtgtgcaagacggccaccggggttttccttcatgttcctgattttatctgcccggtgtggcgttttcatctttgtgtgggtggttcgcctggggtcttggagtgtggtgacgcggtgatggtcacggtgacggtgactgtggcgcgtggcgggtgaggtggttctttcctggtctggtgtgtggcccaggtgagtgtggtgatgagggccagggtgaggatgatgaccagggtggggagtagtttgtctggccggtgtcgccgggcttggtggcgcggcatgtttttccagggtgtgtctccgaacaggtcgtcgtcggaggggtcgtcgtggttcatagggtggccttggcgatggtggtgggcgagtttggtccaggtgatggtgccgtcggaggcgatgtggcggtcggcgggcagggtgtggacggtccatccggcgtcggtgagggcggtggtgaaggatttcttgatggatcgtttgggtaggtcgatgggggcgtgggtgccgacccagatgcaccggtttttgaggtgggtggcgccgaggtggttcatgtcgcggaccatgttttgggtgagtgtgagggtgtcggggtcccattggacggggatgatgatgtggtctgcgatggtgatggcgtgttgccaggcggcgtcgaggtcgttgtttccggtgtcgaggatgatgacgtggaagcggcttcttagggcggtgatgatgcggtcgaggtcgtcggcggtggggggtgtgatgaggctgttgtggttgtcggtgatggtgggtaggcatgtgatggtggcccagccttctggttgccaggagatgtaggggccgaggtcgcggggttgggaggcgaatcctgggtgacgggctgcgcgggcgaggtcgatgacggtgttgtcggtgtggcggggtgcgcgggtggagagggtgccgcgtgggttgatttccacgacgacgatgtcgtcgtgtcctgctgtggtggcgagggcttgggcaaggatgacggccagcggggttttgccggtgccgcctttgaggttggcgagggtgatgatgtggtcggtgagttgggcgggtgcggcggtgtggtgagggttggcggtgaggttggcgatggtgaacagggcatcgagatcgtcggtggtgttctgctcggtgggttgggggtcgccggagatgatcgggtcggcgcggcgcggctgccatgccggcctcaccactgtcacgaccaccacgggtctgctggcgctgtgtgggtgtcgtcggcgatgactcacgatcggcagtctcaccatcgtctcggtgatgctcggctagcgctggacccggtcaagttcgggccggctcacccagtggtgatgactcggtcacagaaccgctgccggtcgttatctcggacgtctcgactcctccagtcctgatgggcgttggagccacctacacctactctcagaacgaccccgacctcgtgtggggcgggggcagatgtcacttgggccaatcgagagcccaggtgatggggaaagcaggggtgtgatatctgtcctggaaaactgggcagctgctaccgtggattgacggatctccacgaaagaagggaatgcgaccatgcagatcaccgtcaagaccatcaaagatcatcgggttcgcactgtccagaccgccatgagcagcgccttggggattggttcccaggtagacatgctcgcccccggcggttccaccagctcgagttccggttcatgctgctcgtgctcgacctgcgcggtagtggcgcagcctcaagactgaacggctggtcagccccaggggcgtggcgctcatcgcgtcacgccccttctattcgctggacagggtgcgcgagctgaggaacatcgcggtgtgtgcgatgacgaggggcaggagcaagtctgtgcgggttgccaagtagccctgcgcgatggccatcacgctggccccgacggcggcgaagacacctccgatacgtcgcttcatgccgccgaattgcatcaggacgaataggactcccgcggtccacatccctccgggcatgcatctgggaaagatgaaccggaagatgatctcttcacaggagagctggagtactagcagcgtagcccccacggggagactcacctctactgacagacggatcgtcttcatccacccacccgagctggcatcgaccatttcggtggccatgcgcgaccggtggcctcgtgcctctcgctgcgtgtcgatccagccgagcagtccgtggacgctctccgctaggactcctgacgcgacagtctcaccaattcctaagcccacggcgaggaccgcgacgcccccctgcacggcaggctgtgtgacttggtggtcccaccaacccgccggcaggaccatgcgtgcgaggctgcacacgagcaggaggtggagggtcacgacgagcgacatctggaataccgcttgccgttcggcgatggtggcgttgggaaagagcggtaggccggcacgggcagcggcgctcgacagcttccgcaagagcggtttggagacgaagtagtaggcgacgtacagcgccagcgctgtcgcgatgatgatcatcggtctgccaccgagctgacccgccgatagccgtttctgttccaccaatactggctgttgtagatcaggtggcccagaacacaggcccagatcccccagaagatgaacaggatagtccccaaggcggcgagcgggatcttggagaggacctgtccccgtccgaacaccgagtggccgcaagcaaacaagagtgctcccacagcggtgagcgcgagccaggccggggttgctcgcagactgatcaccgggaccccgacccggaagccgacctcttctcctacagcgatgactagcaactgccacagcggcatgttctgaacggagcgcgcgactcgggctcgagtcacccacacgggctgttgagcgctcacatcaccactcaggtaccccggtgaggcacttcgcttagtactggggcccgatgtgcgagcattcgtgatgtgtcgcaggatccggttgtcaagccaagaggccagcagggctccggcgacagtgacgggtagcccgatcagcacgaggccccagccatgcggtgccgagaggtttctggccggcgtgcacgcgaggcaggcaaatgccatcactgccagcactacgacgtagatggtcgcataattcgacttgcgggtgacgttgccgaccatcttggccaaagtcgctggggaccagctgatgagtgcgatggtggtcagcaggaagcaggaccagacagacatccggcgcactcaggggtatgggtgcggctgtgggttttggaaaccgccatatgcggcgtagcgggggtgtgcccgcatgggtgcgctgggcagtgacagggcgagcagcccaggcgcccagagcctgacacagtgcagtcccagcccctggatctctatggtggtgaaatcttcgatgtacaggggtgacacacaggtgatgctgttgaccacgctctttaccagttccgcccccgtgtgggtgtcgtcaggtggcaggtcttcggcttgggcaatggtgcccgcgtcgaatttcgccacaactgattgcgcggcctgatagttcctcgcgtagtaggagacgttcgagtcgaggtcaagcatgtcctccgtggacatactggacgcgtcggcctcggcgtcgaaagacgtccataccgcgagcatccgaaccccgctgcactcgagaaacgccttgtacatggctgcttccagacccgcgtctgcacctaggccgacggcgacgaggggaagttggttgccactaccgaccatcatgcatgccacggtgaaatgcttgagcccgggagtcggaagccagtagaaacgcagttcgtggcttcggcccgctgcacgttccacgagccgctggatgcgctggaggcggggtccttcgacgcggatgcgcacaggtgacgaggctccataccacaggcccatcgcggcatctacctggatcaattcataagccgcggacagcgttgcggcgacgcgtgaagtgtggacggcggtgccggtcgtcacggccgttcccagccacggctcaccgtcgtgccgacgggggttgtaacccaggtaaaagaactgcgccgggatccactcctgccgggaggtcccgacacggggagtcttgacccatgtcatgggcaagtcgtcgcgataggtgtcgaacgcacctccagccactcgttgcgcgaagccgaatgcgcccagatcgagaacttcgtcctcggtccgggcgaggagttcctgacgagtcgcccagcgccgttcgaagggactatggagaatcccggtacccgcgcagtagcgctcgacggcctccgcgtagaccttgatctctgcctcaaactcgttcagccccaccccaccgatgtggtagctacccggcttggggtcgggccggtcaagcagtgcgtgcatccccgtgagttccccaccgttcacccgcacgcgggggccgagcgcggggtgcagcgagtagccgacggaagtcaccagcccgcatagcgggctgtaggtgcgccgcctgagccgggctgcggtctcgacggggtcgctatcctggcgaagcttcatcgctcgccccctgccgccagccactcacggatgtcgtagtacaggtccggagcggtttcaacctgcgctggtgcatcaaaacgggacataggtaggacgtcgttgtaggcgatctccatcgtcggtatgtagaccgacaacactttgttgcgcgtcgtgttgaggccgttgcgggcgatgctgacagcctcatgcgcgacgtgcgcggccaagatcgcgcgcaccgacgctgccacggccggcgctccggcccttacgcggtcggcagcggccacccgcatccaggacaggtagctctgccgttcgcgcaggttcatcgcgacccgctgctcgaaggtccggtaggacgaggtcgcaccagggacgacgtagggacccacgtacaaggccggcccgtctacagctgcgtggagccacgacaggtgggcgcgtcgggcgaacaggtcaagggcgcgcagcatagccgggttgttctgcgccagcgctaccacaaggagtggctgcaggtccggcgccgaacccagcaacgccaacatctgggaggcctcctgctccatgtgcaactcgtcggccgactgctcaagccgcaggcctgcgaagagggtggctgatggctgcgtgtcgtcagcgaggacggtagcctgcagcccctctccctcgagaatctgctggatatcgccggcgaggagcgcgtcgtcgctgaatacccacaccgggcgcgtctctctacctccatccatcttgtcctcaacgttttcgaccagcgcaccgatcgatgctaggtgggccatcacgtcgtcaagggccgcgcgggtcaatccgggcacccgggacacgatctcgggcggctgcagtccttggctcaacaagtccaaggccggccacagggtcccggtggcgtcgtcgtcctccagcgttgtgctctcggcgttccagacgcctcgacggaactccaccctgtccatcgagtaaggcaccatcatgaggcccggtgaaatgtggttggtcactttggctcctgtacagcctaggcttggacgcccacggtcatggtgtgggtcgcggtttggaaaatcccgtcgaggttgagtgcctgattgagttcgtcctcgtagaagcttgaggactcgactgaggcaagaccgagccccgtgcagaccaagttgatctgttgtgcgatcgccccgacttcttgaagggcgaacctcaaacccctggctccgtacttccgcatcgccctccacggcgagatgacgaacaccaagtgcactccggccgcatccgattgctccacggccggctcgccggccatcgaattcctcacgccgcgacagccctcttcaccggtcacgggcaccagtcgatcgatgaccggcgagtagcggtagacgccgcgactcaagccggacacccgttgtgcggacatgaagatagacacgggatacagccctccaccagacgggacagcgcgtacattataccgcacgatatcaccgctcgaacgtgggacatccacgtgccccgtcacaccggcagcacctctcagaaacgcagctacgtcacgcaggtctagggattcgccggtgtagttccgtccgctgcgccggcgggcgatcacttgctcgaggggtgcgcgcaccctgctggacctgggaagttcgatcacatcggcagcgaacgtgtcgcgatccatctgtccgtacgtaacgatcatggggtcaacgaaatagtcgccgaccgagacgttgaactccatatccccccgggcgatgcgcgaggcgagcaagaagtctgcagctgcgttagacagccccggcccatcagtgttgtcgcagcggaactcgtgggtccgaaaccccacaccttccgtgcccgggctctgcgctcgatacgacgtgatcgcagaactagccttccttaaaccgcccggagtagctaccatgaccgtcccctctgaggtctcccgaacacttgcgacaatagcagcatgtgggggcagccgccagaggcgggcatccttgtctcgacaaccattgacctccggattcgatatgtgcataatcatagtcgtgccaacacgaaacgtgtacgtctcggaagacgacctagacctgttcgccgaagccaccgagatcgctggaggcctgtccgcagcggtgttggaggccttgcgcagctacgtagacaggcaccatcgcgcggccggcggattcgacgagatcgagctggagctgcagaacgacggtatcgaccaccgtgtcaccttcatgggtcgccgcctgatacacatccgccgtccagatcccgagggaacccgcatagacactgtctacttgaccgccaaacaccaattcgccgttgccaccaaaatccaacgacggctgccagactggacggccggccacgagcacatctggtccgacccggagacctggaatcgggagttctggatcgcaggtgacaagacgatggccgtgtatcccagccttgacaaactccgcgaagctgaccccaatgtggccgaacgcgccgaggccgcggtcaaaatcccgccgttcgaggtcctggacatctgatgacagaatcatcatcttcccggcggcaattggcaatgccggtgctgtcagtcacggatctagccaagaaatacgtggttcatggcggctacgaggtcccggcactcaacggtgtctcgtttgacctgcacccgggagagatgctgggtttgttcgggccaaacggtgctggaaagacgacgctggtcaggatcatcgcgggcctcttatcggcagattctggagacgtccactggggatcggatcaaggtcgggccaggttaggctacgtgtcccaaaagggtggactgcagtacgggctcacgtgccgggaagagatggtcttccacgcacaatgcttcggccagtccgccaagcaggcccggactagcgtcgacgaggtcgccgcgatgctgcactgcgattacctgatggagtgggacgtcggaaggctctccggtgggcaacgccgaatcatcgaggtagggctagcactcgtcaatcaaccatcggtcgtcctgctcgacgagcccaccctgggcctggaccccgcaacacgcctgtcgttgtggcaaacggtaaagtcggcacgccgtgagaccggtgctgccttcctcgtcaccacccactacattgacgaggtggccgagcacctgtccaacgtcagcgtgatcaaccacggaaccgtcgtcgccaacggctcgccagcgcacatccgagaaatgttcgcgaccggggaagtaacgctcggcgtggccgaggatacggtggacagtgcggtggacgtgttggctgggaccgcgttcgaggcgcaccccaccgaaaccgtcccggggatcgtggtcaggtccaggcatcccgacgtggacgcggccaagatcatcaccatcctggctggtcatggcatctcggtggactccatatccgtacgcgaggcgaccttggaagaggcgtttctcacgatcacaggcagtcgagacccggagaggcaaatcccatgaacacttgcttcaggcgatatgcggcgatgtcgctgagagcgcggcgtgatttggccctgacattcatccagcccctcgtctacctagccctcttcggaccgctcttcgtcacgacgatgaagatgtcgcagagagctaccgccgctacgggttactccctatacatcacgggcctgtccatccaaatggccatgacgatcggtgccttcgcggggctaaccatcatcctcgaataccgactcggcatcctcgaacggatctggagcacccccctcacggggagcaagatgatggcggggcgaatcgcgcgcgacgtcgttatgatgatgatgccgatactggtcgtcttcatcatcggcctggtgctgggaacacgccccagcccactgggcctggcgacctacttcgtgacagtgctcggcacaggagccacgttcgccggggtctcctacgcggtggcactcagaacgaagagcgaggcagcgctatccgcgatcttcaacctcatcctgctacccatcctcctgctgtcggggatcatgctgcccatgtcgttcgcaccacactggatcgccaccgctgcccacgtgaacccgttgtggtacctggtgcaaggcgcgcggaaccagttcagcgttctagggctcgtggcggcggccccatggagttgggctgtggccatcgtcatgtcagccgctgccttcggctgggcaagccacgaattcaacaagaggcgctgacacaaagaatggtgccgggaacccaggtccccggcaccaccgagtgcactcgcgacgtcaacgcaccgttgcggtcactgcgcaggtcgagcacgaggacgacgagcccgcgctgctgcaggtcgagccgccaggcgcgagcaggtcgacgttagcgtcggcgccgccgaagacggacgtgacggccggctgagaggtgcggatgcggtgctccagcgaggaggtggtggtgagtttcatgggaggtgctcctaggagtgagacgagaacaaaccctagcgataggttagcagtccgcaaccgactccgggaatagtagaagcgcgcatccgtagcggaagaccttagcctgattacagtgaccctgttcgcgtctcaacattattccacacccccgagcagcgaacgacaccgcgatgatgatccgtcgcctctccaccgaagaactccgcgcccacatcgcaccgggccgccgtcccgtgcatcagacctgccgtcaacgtcggccatgaagctgggaaggtggctctcgtctaggagcagacgcgggacgcctcctccaggttgggccggggaagtgtccggttcttgatgtaggtggcggtccctattgatgggcgttgaccgtgggaatgcggtcggcgaagggggtggcgaacccgttgagcgcaggcttccagcgcatgcatcaacgctgtctgccggccaccggcaagcctcacccgcccgtcatggccatcatcgaggtgccggtgaatcctcgacacatgatcccaactcccccggaggggcttccggggctgttcagccaccagatcagccaggcggcgagcccgactctgccacccggaccctgcagagcgtgcctgctgccgtcgtgtcgtgtcgggccagtgggccaccagatcggccacatccgtcttggcccat

SEQ ID NO: 116 - DNA, 12654 bp, Propionibacterium acnes
  source 1..12654: mol_type = genomic DNA
gtgagtttcttccattgatgacaacagcacggtgctgccgtctgtgtgcggccccccaccccgcacacagttgccgtcgaggacgttgttcatgctctgtggtggccggtcctgagggcggctcgcaggatctcccggcgctcacggcgacgagcctggtagccaaggtctgcatgttcggcggcgagacgggctttgagggttgcggcttctgcacggcggtggagttggtcgtcgatgagttgggcgcgggccagacgccgcttatgggggttgtcgtgggtgaggggggcgtcgaggctgccgtcgtgggttagggccagggctgctcgttcggcgtcgtcgaggccgatgtggtggacggtcacgggtgcggtggtgacgtcgaggatgtccaggtggatgttgtggccgccgccgggggcttcggggaagtctggtgggctggcctggccggtgtcggggtcataccaggacaggccgatgatctcggcccagggtgggggcgggcagacggctcgcagaagggtgtgggccaggaacgtgttgcgggccatgatgcctccaagggtgaaaagcagtcgagtagcgatgacggcggggtagccgtctgctgggctgaggccgaccgggcccatgtcctcgatgctcttgtgctgcggccataccccaaagctaccaaacagtctttttaatctcaaagatacaaacagtgcttgacatattatctgcagcgaaagatactttcatcatggtggctgatcatgattacgcgactcctgacgatgagtggatgacacctcctcaggtggcccgtgtgattccgaacaccactgctcaggctgtccggcgctgggctgaggagggtcagcttcctggggcgtttcgtactccttctgggcgttggcatattccgtggtcggctgtggtgggcatcatggggtttgatccgcgtgagtccgcatcaccgagtgatcgtcaccagagctgacagagtcgtcgatgagctttcgagtgcagagctgatggcacgacggtctggatacttgtggagatgagagacgaccacatccagtcatggtcggggtacaccgaggggcagattcagcagtgctggcacgatgaggttgcccctgccattgactcgctcatggagcaggtaaggtctgttgccgagactcctgtgccgccgggttcgagattttacggcgatgagcagtgggccaagccttttcatccgtctactgcgatctgcggttcaatgggtccgccagcgatcacttgcacgcgctgaagctcctcgtctgggaagcgaacgtccaccatgtctatgcgccgtacacccttgctcgtgcatctattgaggcatcgtctactgctgtgtggctgttgagcacgaagacgcgcggagaacgtgtgctgcgagccttgcgatggtacgcgcaggattgtcacgactcgtgcaggttcatggatgatgagcagtatcgtgaccacctattgcggcgcattgaggggactgtcgctgcgggaaatctcgactcgcgcgctgctaggaaacggtaccgtgcaaccgatgttgtcgatgaggctgatcagctggttcccggaactctgagggcgtggcgagctttttctggtatggcccattcccgtatgtgggcatccagggggctgctcgacatggaagtgctgtccagtggccaaggaatggttacggcgaaggtgacgagcggatcggcccaaatcctttgggccgtcgtggcagctctgaatgttgctctcagtgccgctcgcttgtggcgtgattcgatgtgctcaccgtttgctgttgcccagtcggtagacgcgatgccagaggcgtttcgccgccctgtttagggtctgatcggggtagtgggtgttcacggggtcccaggttggccatggggcggcttggtgatgtgagttgggttgtgtggcagcctgggtgttgggtgtggcttcgttggccacgaaggcatgctcttccttgtgctgggacttgagtccccagtgctctcccctttgctagtggggggtggggtccccggaggtaggtcctccggggactttttctatgtctgtccgtgccccaggatttcgtatctaggcagtaccaattttgggttagttggaggtttctttggtaatggacagggtgagggtgatgaagaggtggccgtccttggtggcagaaattttctcgaacttcagctgaatgttgttatcagccactatctgttgggcggtgaggtgctcggagagcttctggaatccttcgcggatccacaggttgtaggggttggtgaccgagaccgaagggtatgggtcgaccttcagcgtcaggactggctggtctgggttgagggagttgatcttcaccagtttggggtaccggtcgcactcatgtgtctcttgtgttgggggccagcagtcgggggcccattcctcccagtggtcacgcatctcacgaagtactttcctgcatctcagcctctgcaggagctcgcgcgccaccgatgggagggctgccatgatgagggcaaggactgcgaacccgatgatgtaattgaccgtgtccctcgtcacgccgttcttgccgaggattccgatggcgaacgcgatgacgacaccgcccaggcacaggtgcatggggtcatgctgtgatggtttttcttcttcagcgactggtggggctatagtcatgtgtgccccttagtactaagtgatactggtgggttgcttttccccggtggccgtgtgcaagacggccaccggggttttccttcatgttcctgattttatctgcccggtgtggcgttttcatctttgtgtgggtggttcgcctggggtcttggagtgtggtgacgcggtgatggtcacggtgacggtgactgtggcgcgtggcgggtgaggtggttctttcctggtctggtgtgtggcccaggtgagtgtggtgatgagggccagggtgaggatgatgaccagggtggggagtagtttgtctggccggtgtcgccgggcttggtggcgcggcatgtttttccagggtgtgtctccgaacaggtcgtcgtcggaggggtcgtcgtggttcatagggtggccttggcgatggtggtgggcgagtttggtccaggtgatggtgccgtcggaggcgatgtggcggtcggcgggcagggtgtggacggtccatccggcgtcggtgagggcggtggtgaaggatttcttgatggatcgtttgggtaggtcgatgggggcgtgggtgccgacccagatgcaccggtttttgaggtgggtggcgccgaggtggttcatgtcgcggaccatgttttgggtgagtgtgagggtgtcggggtcccattggacggggatgatgatgtggtctgcgatggtgatggcgtgttgccaggcggcgtcgaggtcgttgtttccggtgtcgaggatgatgacgtggaagcggcttcttagggcggtgatgatgcggtcgaggtcgtcggcggtggggggtgtgatgaggctgttgtggttgtcggtgatggtgggtaggcatgtgatggtggcccagccttctggttgccaggagatgtaggggtcgaggtcgcggggttgggaggcgaatcctgggtgacgggctgcgcgggcgaggtcgatgacggtgttgtcggtgtggcggggtgcgcgggtggagagggtgccgcgtgggttgatttccacgacgacgatgtcgtcgtgtcctgctgtggtggcgagggcttgggcaaggatgacggccagcggggttttgccggtgccgcctttgaggttggcgagggtgatgatgtggtcggtgagttgggcgggtgcggcggtgtggtgagggttggcggtgaggttggcgatggtgaacagggcatcgagatcgtcggtggtgttctgctcggtgggttgggggtcgccggagatgatcgggtcggcgcggcgcggctgccatgccggcctcaccactgtcacgaccaccacgggtctgctggcgctgtgtgggtgtcgtcggcgatgactcacgatcggcagtctcaccatcgtctcggtgatgctcggctagcgctggacccggtcaagttcgggccggctcacccagtggtgatgactcggtcacagaaccgctgccggtcgttatctcggacgtctcgactcctccagtcctgatgggcgttggagccacctacacctactctcagaacgaccccgacctcgtgtggggcgggggcagatgtcacttgggccaatcgagagcccaggtgatggggaaagcaggggtgtgatatctgtcctggaaaactgggcagctgctaccgtggattgacggatctccacgaaagaagggaatgcgaccatgcagatcaccgtcaagaccatcaaagatcatcgggttcgcactgtccagaccgccatgagcagcgccttggggattggttcccaggtagacatgctcgcccccggcggttccaccagctcgagttccggttcatgctgctcgtgctcgacctgcgcggtagtggcgcagcctcaagactgaacggctggtcagccccaggggcgtggcgctcatcgcgtcacgccccttctattcgctggacagggtgcgcgagctgaggaacatcgcggtgtgtgcgatgacgaggggcaggagcaagtctgtgcgggttgccaagtagccctgcgcgatggccatcacgctggccccgacggcggcgaagacacctccgatacgtcgcttcatgccgccgaattgcatcaggacgaataggactcccgcggtccacatccctccgggcatgcatctgggaaagatgaaccggaagatgatctcttcacaggagagctggagtactagcagcgtagcccccacggggagactcacctctactgacagacggatcgtcttcatccacccacccgagctggcatcgaccatttcggtggccatgcgcgaccggtggcctcgtgcctctcgctgcgtgtcgatccagccgagcagtccgtggacgctctccgctaggactcctgacgcgacagtctcaccaattcctaagcccacggcgaggaccgcgacgcccccctgcacggcaggctgtgtgacttggtggtcccaccaacccgccggcaggaccatgcgtgcgaggctgcacacgagcaggaggtggagggtcacgacgagcgacatctggaataccgcttgccgttcggcgatggtggcgttgggaaagagcggtaggccggcacgggcagcggcgctcgacagcttccgcaagagcggtttggagacgaagtagtaggcgacgtacagcgccagcgctgtcgcgatgatgatcatcggtctgccaccgagctgacccgccgatagccgtttctgttccaccaatactggctgttgtagatcaggtggcccagaacacaggcccagatcccccagaagatgaacaggatagtccccaaggcggcgagcgggatcttggagaggacctgtccccgtccgaacaccgagtggccgcaagcaaacaagagtgctcccacagcggtgagcgcgagccaggccggggttgctcgcagactgatcaccgggaccccgacccggaagccgacctcttctcctacagcgatgactagcaactgccacagcggcatgttctgaacggagcgcgcgactcgggctcgagtcacccacacgggctgttgagcgctcacatcaccactcaggtaccccggtgaggcacttcgcttagtactggggcccgatgtgcgagcattcgtgatgtgtcgcaggatccggttgtcaagccaagaggccagcagggctccggcgacagtgacgggtagcccgatcagcacgaggccccagccatgcggtgccgagaggtttctggccggcgtgcacgcgaggcaggcaagtgccaacactgccagcactacgacgtagatggtcgcataattcgacttgcgggtgacgttgccgaccatcttggccaaagtcgctggggaccagctgatgagtgcgatggtggtcagcaggaagcaggaccagacagacatccggcgcactcaggggtatgggtgcggctgtgggttttggaaaccgccatatgcggcgtagcgggggtgtgcccgcatgggtgcgctgggcagtgacagggcgagcagcccaggcgcccagagcctgacacagtgcagtcccagcccctggatctctatggtggtgaaatcttcgatgtacaggggtgacacacaggtgatgctgttgaccacgctctttaccagttccgcccccgtgtgggtgtcgtcaggtggcaggtcttcggcttgggcaatggtgcccgcgtcgaatttcgccacaactgattgcgcggcctgatagttcctcgcgtagtaggagacgttcgagtcgaggtcaagcatgtcctccgtggacatactggacgcgtcggcctcggcgtcgaaagacgtccataccgcgagcatccgaaccccgctgcactcgagaaacgccttgtacatggctgcttccagacccgcgtctgcacctaggccgacggcgacgaggggaagttggttgccactaccgaccatcatgcatgccacggtgaaatgcttgagcccgggagtcggaagccagtagaaacgcagttcgtggcttcggcccgctgcacgttccacgagccgctggatgcgctggaggcggggtccttcgacgcggatgcgcacaggtgacgaggctccataccacaggcccatcgcggcatctacctggatcaattcataagccgcggacagcgttgcggcgacgcgtgaagtgtggacggcggtgccggtcgtcacggccgttcccagccacggctcaccgtcgtgccgacgggggttgtaacccaggtaaaagaactgcgccgggatccactcctgccgggaggtcccgacacggggagtcttgacccatgtcatgggcaagtcgtcgcgataggtgtcgaacgcacctccagccactcgttgcgcgaagccgaatgcgcccagatcgagaacttcgtcctcggtccgggcgaggagttcctgacgagtcgcccagcgccgttcgaagggactatggagaatcccggtacccgcgcagtagcgctcgacggcctccgcgtagaccttgatctctgcctcaaactcgttcagccccaccccaccgatgtggtagctacccggcttggggtcgggccggtcaagcagtgcgtgcatccccgtgagttccccaccgttcacccgcacgcgggggccgagcgcggggtgcagcgagtagccgacggaagtcaccagcccgcatagcgggctgtaggtgcgccgcctgagccgggctgcggtctcgacggggtcgctatcctggcgaagcttcatcgctcgccccctgccgccagccactcacggatgtcgtagtacaggtccggagcggtttcaacctgcgctggtgcatcaaaacgggacataggtaggacgtcgttgtaggcgatctccatcgtcggtatgtagaccgacaacactttgttgcgcgtcgtgttgaggccgttgcgggcgatgctgacagcctcatgcgcgacgtgcgcggccaagatcgcgcgcaccgacgctgccacggccggcgctccggcccttacgcggtcggcagcggccacccgcatccaggacaggtagctctgccgttcgcgcaggttcatcgcgacccgctgctcgaaggtccggtaggacgaggtcgcaccagggacgacgtagggacccacgtacaaggccggcccgtctacagctgcgtggagccacgacaggtgggcgcgtcgggcgaacaggtcaagggcgcgcagcatagccgggttgttctgcgccagcgctaccacaaggagtggctgcaggtccggcgccgaacccagcaacgccaacatctgggaggcctcctgctccatgtgcaactcgtcggccgactgctcaagccgcaggcctgcgaagagggtggctgatggctgcgtgtcgtcagcgaggacggtagcctgcagcccctctccctcgagaatctgctggatatcgccggcgaggagcgcgtcgtcgctgaatacccacaccgggcgcgtctctctacctccatccatcttgtcctcaacgttttcgaccagcgcaccgatcgatgctaggtgggccatcacgtcgtcaagggccgcgcgggtcaatccgggcacccgggacacgatctcgggcggctgcagtccttggctcaacaagtccaaggccggccacagggtcccggtggcgtcgtcgtcctccagcgttgtgctctcggcgttccagacgcctcgacggaactccaccctgtccatcgagtaaggcaccatcatgaggcccggtgaaatgtggttggtcactttggctcctgtacagcctaggcttggacgcccacggtcatggtgtgggtcgcggtttggaaaatcccgtcgaggttgagtgcctgattgagttcgtcctcgtagaagcttgaggactcgactgaggcaagaccgagccccgtgcagaccaagttgatctgttgtgcgatcgccccgacttcttgaagggcgaacctcaaacccctggctccgtacttccgcatcgccctccacggcgagatgacgaacaccaagtgcactccggccgcatccgattgctccacggccggctcgccggccatcgaattcctcacgccgcgacagccctcttcaccggtcacgggcaccagtcgatcgatgaccggcgagtagcggtagacgccgcgactcaagccggacacccgttgtgcggacatgaagatagacacgggatacagccctccaccagacgggacagcgcgtacattataccgcacgatatcaccgctcgaacgtgggacatccacgtgccccgtcacaccggcagcacctctcagaaacgcagctacgtcacgcaggtctagggattcgccggtgtagttccgtccgctgcgccggcgggcgatcacttgctcgaggggtgcgcgcaccctgctggacctgggaagttcgatcacatcggcagcgaacgtgtcgcgatccatctgtccgtacgtaacgatcatggggtcaacgaaatagtcgccgaccgagacgttgaactccatatccccccgggcgatgcgcgaggcgagcaagaagtctgcagctgcgttagacagccccggcccatcagtgttgtcgcagcggaactcgtgggtccgaaaccccacaccttccgtgcccgggctctgcgctcgatacgacgtgatcgcagaactagccttccttaaaccgcccggagtagctaccatgaccgtcccctctgaggtctcccgaacacttgcgacaatagcagcatgtgggggcagccgccagaggcgggcatccttgtcccgacaaccattgacctccggattcgatatgtgcataatcatagtcgtgccaacacgaaacgtgtacgtctcggaagacgacctagacctgttcgccgaagccaccgagatcgctggaggcctgtccgcagcggtgttggaggccttgcgcagctacgtagacaggcaccatcgcgcggccggcggattcgacgagatcgagctggagctgcagaacgacggtatcgaccaccgtgtcaccttcatgggtcgccgcctgatacacatccgccgtccagatcccgagggaacccgcatagacactgtctacttgaccgccaaacaccaattcgccgttgccaccaaaatccaacgacggctgccagactggacgaccggccacgagcacatctggtccgacccggagacctggaatcgggagttctggatcgcaggtgacaagacgatggccgtgtatcccagccttgacaaactccgcgaagctgaccccaatgtggccgaacgcgccgaggccgcggtcaaaatcccgccgttcgaggtcctggacatctgatgacagaatcatcatcttcccggcggcaattggcaatgccggtgctgtcagtcacggatctagccaagaaatacgtggttcatggcggctacgaggtcccggcactcaacggtgtctcgtttgacctgcacccgggagagatgctgggtttgttcgggccaaacggtgctggaaagacgacgctggtcaggatcatcgcgggcctcttatcggcagattctggagacgtccactggggatcggatcaaggtcgggccaggttaggctacgtgtcccaaaagggtggactgcagtacgggctcacgtgccgggaagagatggtcttccacgcacaatgcttcggccagtccgccaagcaggcccggactagcgtcgacgaggtcgccgcgatgctgcactgcgattacctgatggagtgggacgtcggaaggctctccggtgggcaacgccgaatcatcgaggtagggctagcactcgtcaatcaaccatcggtcgtcctgctcgacgagcccaccctgggcctggaccccgcaacacgcctgtcgttgtggcaaacggtaaagtcggcacgccgtgagaccggtgctgccttcctcgtcaccacccactacattgacgaggtggccgagcacctgtccaacgtcagcgtgatcaaccacggaaccgtcgtcgccaacggctcgccagcgcacatccgagaaatgttcgcgaccggggaagtaacgctcggcgtggccgaggatacggtggacagtgcggtggacgtgttggctgggaccgcgttcgaggcgcaccccaccgaaaccgtcccggggatcgtggtcaggtccaggcatcccgacgtggacgcggccaagatcatcaccatcctggctggtcatggcatctcggtggactccatatccgtacgcgaggcgaccttggaagaggcgtttctcacgatcacaggcagtcgagacccggagaggcaaatcccatgaacacttgcttcaggcgatatgcggcgatgtcgctgagagcgcggcgtgatttggccctgacattcatccagcccctcgtctacctagccctcttcggaccgctcttcgtcacgacgatgaagatgtcgcagagagctaccgccgctacgggttactccctatacatcacgggcctgtccatccaaatggccatgacgatcggtgccttcgcggggctaaccatcatcctcgaataccgactcggcatcctcgaacggatctggagcacccccctcacggggagcaagatgatggcggggcgaatcgcgcgcgacgtcgttatgatgatgatgccgatactggtcgtcttcatcatcggcctggtgctgggaacacgccccagcccactgggcctggcgacctacttcgtgacagtgctcggcacaggagccacgttcgccggggtctcctacgcggtggcactcagaacgaagagcgaggcagcgctatccgcgatcttcaacctcatcctgctacccatcctcctgctgtcggggatcatgctgcccatgtcgttcgcaccacactggatcgccaccgctgcccacgtgaacccgttgtggtacctggtgcaaggcgcgcggaaccagttcagcgttctagggctcgtggcggcggccccatggagttgggctgtggccatcgtcatgtcagccgctgccttcggctgggcaagccacgaattcaacaagaggcgctgacacaaagaatggtgccgggaacccaggtccccggcaccaccgagtgcactcgcgacgtcaacgcaccgttgcggtcactgcgcaggtcgagcacgaggacgacgagcccgcgctgctgcaggtcgagccgccaggcgcgagcaggtcgacgttagcgtcggcgccgccgaagacggacgtgacggccggctgagaggtgcggatgcggtgctccagcgaggaggtggtggtgagtttcatgggaggtgctcctaggagtgagacgagaacaaaccctagcgataggttagcagtccgcaaccgactccgggaatagtagaagcgcgcatccgtagcggaagaccttagcctgattacagtgaccctgttcgcgtctcaacattattccacacccccgagcagcgaacgacaccgcgatgatgatccgtcgcctctccaccgaagaactccgcgcccacatcgcaccgggccgccgtcccgtgcatcagacctgccgtcaacgtcggccatgaagctgggaaggtggctctcgtctaggagcagacgcgggacgcctcctccaggttgggccggggaagtgtccggttcttgatgtaggtggcggtccctattgatgggcgttgaccgtgggaatgcggtcggcgaagggggtggcgaacccgttgagcgcaggcttccagcgcatgcatcaacgctgtctgccggccaccggcaagcctcacccgcccgtcatggccatcatcgaggtgccggtgaatcctcgacacatgatcccaactcccccggaggggcttccggggctgttcagccaccagatcagccaggcggcgagcccgactctgccacccggaccctgcagagcgtgcctgctgccgtcgtgtcgtgtcgggccagtgggccaccagatcggccacatccgtcttggcccat

SEQ ID NO: 117 - DNA, 12567 bp, Propionibacterium acnes
  source 1..12567: mol_type = genomic DNA
gtgttccagtgcctcgcgggcgtgatgttcttcttcggcaccttcttgccacatgcttcgcgcttcagcctcgccatccaagcgaacctggactgtgaacgagtcctcatcgggtccgtcctcattccacgcggcaatgatcccacgggcctcgtctgcgacctgactcaacttcatcgcctgcccgacagccccgagagccggaatctcgaacacccagatattcgcctcagccgagacctcacgatgggcgatcacttcgtaggtcgtctcaccttctactgtcgtgtccattacttccactccttcggaattttcacgcctgctcgctccagctgtgccaggacaccaactgacgtcagctggtgtcctgctggtatcgatacgcgcccggctccgccggggcgtccccagatttcatggcttcccttggcgttccgcagacgggcccatccttgagaacggagcagcttgaggacgtccttagttttctgcggtttcacacatcatagtatagccccacttaacttgtaaactaagcccctgtttacattttagttggtgcatgtgatccctgctcttatgacgtcgcccgacctggcgccttagacatgcactgttcatcctcaaccacactcaccgtcacgggtccgaaggcgaggtctatcaccattcgcatcgatgaagttgaagcaggatcgtccgcatcacgcactgccgatccggacagacgccaccggccgtaccgactgtttacgatctgccaccgcagactgctgccataaccgctatcacctctgatagtacgtttagtactatcagaggtgattcaagattctcctgtcgagcagccctacagtcacgaagtcctgcgatcgtcatcgcttaaggcagacggatggccatcggggaccactcgcaaagcaggggcgatcagcaacagtgatgtgccatgagcaagtactggtgcaccggctgtttactccgcccctagataaaccacgggtgcaggggtggacaccacaccatgaccgatgtggtgcccaccccatggctcacaggcaggccctatcgccgggagcactgctgcagatgaggctcagtaacctgccatgtctcacctggggccaaggtgccaagctccccacggaatctcaggcatcggaaaccagcagccgaacttccacagcatgagcgccctacgaaaaagcaggccgccgacggttctcaagaactcgccggcggcctgcatcgccactcgaactgtaaccgtggtccgaccccgtgcacaggtaagctccacactcccaccaggcatggccgaggcagtaccaagttgccgtggcccatcggcagatttggttaaattttgaaaagtcatatagactccttctgtaaatttttaaatctcataggactctcgccatcgccagccagcttcgacaggagtcccgatgtttcaccgagtgaaatatcggcaccgtttgagttgacctaaagctcaaaagatgctagaatccatcttacctcgttaggggcgttttgtcaaacgcccctatattgcgtgtcttcgcgcgtcgtagcgctgatgctgcgcctgtgtcgactatccgtttgtaagtactttcgatgacaccagcagtggctactcatgactggtgcgtgcgggtctaaagcagcagggaaaggaatcgcagtagaagccgcttgattcctatcacccctgatggtactatcagtactaacagagcagggcttactcgatgcgtgagaatcggggacatgctgagcctctcgtaggtcattggcctgctgggcgtcagtgtggcgcggttcgatccagtgaactctatcagctctgttagtactgtcagagttgatatattcgaccccaggaggagcccatgagttacatcgttcgcaccggaaatttggtcgacacccccgagctgcgtgagggagagcatggcccgtacacctacgctcgcgtcatcgtgtccgatcgcattcgccaggaggacggcagctacgtcaacgggccagcgatcgcctacgacgtcttggcgggtggcagccaagccgtgaatctggttgaagccgccaaggcgagcggcaacatccgcatcatgttcgcgggccgttaccgcgtcaccgagtggcggggtgagcagggcactcgtatccagcatgaggtccgagccgacgaagtgagcgtgagcctgctcggtcagagggtgaccgtggagcggcctcgaggtgacgtggcatccaaggagagcacgtcgttctgattgagtccgggggcacggtggtcgccgtggtaaaccgtgcccctgacagtactattgacactattggaggtatcagtgtgactgctcaaattttcgccttgtgcaaccagaagggtggcgtcggaaagtcgacatcgacgtttcatctggcccgtgccgcggtgttgcgtggccagcgtgtgcttgtcgtcgacaacgacccccagggcaacctgacgtctgtcgcggccgccgagcccgtgggggaggatcaggcggggctggccgatgtgctcagcgcgcgtgctccagagaccctccgcgatgtgatcgtgccgggaatctggtctggcctcgatgtcgtgccgacgtctggcatcacgctcggctgggtgcgtgacgaactcgtgatcgccggtgccggccgagaaggccggctgcgggaggccctggccggcgtcgaggacgactacgacgtgatcctgatcgactgtgctccatcgctcgatcagctcacgatcaacggcctggtggccgcccagggtgtcatcgtcgtgacgcactcgaagttgtggagcgccaacggcctcgcccagctgctcgacaccatcgacagcgtgcgcagctactacaacggcgcgctgcgcgtggcgggcatcatcgtcaaccagcacgaggagaacaccatcagcgggaaaacctggctcgacgagctgcatcaggctgccgagtcccggaagctgaccgtgcttgacccgccgatccccaagcgtgtcgtcatcgccgataccgtcgaggccgcgcgcggtctcgacgagtggggaagtgccgaggcggccgcgctcggccagttgtacgcccaccacctgacctgcatcgaaggagccctgtgatgacccgtccagccccccgaaagtcctcattgagcggatcaactccggtcgccccgccggctcagacggcgccggcaccgtctgccgcacctaccccccacaaggccgatgagtcacagacgagcagcaccacgaggaagtggcggcacaaggtgtcgttctaccaggacccggccgacaccgaccgggtgcgcggggcgatcctttacacgatgacgaccgagggcaaccggaacctgagccagttcgtcaacgatgccgtcatggccaaggtggtcgagctggaagtcaagtacaacgatggccagccattccccgctgtgggagcccgaggactaccccagggcggtgcagccgccgccggtgagtagaggaccatcgaccgtcgggggcttcaccatgcccccgaccctcggtcatcctgatcctcttgtcgatggtggtgacagtgggggattcacgcctcgttcagatcagaggaagtctcaccgcgtgattagtactatcaaatctgacagtactaacagagcagatagggttccctaggtcgagctgtatcacgccgacaaccagtgagccagtgatctacgaggggcgcaatatgcacccgatcggtagccgcgaaggcctcgccctgccccgatagtactatcaccactatcaatggtgctagtggtgagtttcttccattgatgacaacagcacagtgctgccgtctgtgtgcgggccaccagcccgcacacagttgccgtcgaggacgttgttcatgctctgtggtggccggtcctgagggcggctcgcaggatctcccggcgctcacggcgacgagcctggtagccaaggtctgcatgttcggcggcgagacgggctttgagggttgcggcttctgcacggcggtggagttggtcgtcgatgagttgggcgcgggccagacgccgcttatgggggttgtcgtgggtgaggggggcgtcgaggctgccgtcgtgggttagggccagggctgctcgttcggcgtcgtcgaggccgatgtggtggacggtcacgggtgcggtggtgacgtcgaggatgtccaggtggatgttgtggccgccgccgggggcttcggggaagtctggtgggctggcctggccggtgtcggggtcataccaggacaggccgatgatctcggcccagggtgggggcgggcagacggctcgcagaagggtgtgggccaggaacgtgttgcgggccatgatgcctccaagggtgaaaagcagtcgagtagcgatgacggcggggtagccgtctgctgggctgaggccgaccgggcccatgtcctcgatgctcttgtgctgcggccataccccaaagctaccaaacagtctttttaatctcaaagatacaaacagtgcttgacatattatctgcagcgaaagatactttcatcatggtggctgatcatgattacgcgactcctgacgatgagtggatgacacctcctcaggtggcccgtgtgattccgaacaccactgctcaggctgtccggcgctgggctgaggagggtcagcttcctggggcgtttcgtactccttctgggcgttggcatattccgtggtcggctgtggtgggcatcatggggtttgatccgcgtgagtccgcatcaccgagtgatcgtcaccagagctgacagagtcgtcgatgagctttcgagtgcagagctgatggcacgacggtctggatacttgtggagatgagagacgaccacatccagtcatggtcggggtacaccgaggggcagattcagcagtgctggcacgatgaggttgcccctgccattgactcgctcatggagcaggtaaggtctgttgccgagactcctgtgccgccgggttcgagattttacggcgatgagcagtgggccaagccttttcatccgtctactgcgatctgcggttcaatgggtccgccagcgatcacttgcacgcgctgaagctcctcgtctgggaagcgaacgtccaccatgtctatgcgccgtacacccttgctcgtgcatctattgaggcatcgtctactgctgtgtggctgttgagcacgaagacgcgcggagaacgtgtgctgcgagccttgcgatggtacgcgcaggattgtcacgactcgtgcaggttcatggatgatgagcagtatcgtgaccacctattgcggcgcattgaggggactgtcgctgcgggaaatctcgactcgcgcgctgctaggaaacggtaccgtgcaaccgatgttgtcgatgaggctgatcagctggttcccggaactctgagggcgtggcgagctttttctggtatggcccattcccgtatgtgggcatccagggggctgctcgacatggaagtgctgtccagtggccaaggaatggttacggcgaaggtgacgagcggatcggcccaaatcctttgggccgtcgtggcagctctgaatgttgctctcagtgccgctcgcttgtggcgtgattcgatgtgctcaccgtttgctgttgcccagtcggtagacgcgatgccagaggcgtttcgccgccctgtttagggtctgatcggggtagtgggtgttcacggggtcccaggttggccatggggcggcttggtgatgtgagttgggttgtgtggcagcctgggtgttgggtgtggcttcgttggccacgaaggcatgctcttccttgtgctgggacttgagtccccagtgctctcccctttgctagtggggggtggggtccccggaggtaggtcctccggggactttttctatgtctgtccgtgccccaggatttcgtatctaggcagtaccaattttgggttagttggaggtttctttggtaatggacagggtgagggtgatgaagaggtggccgtccttggtggcagaaattttctcgaacttcagctgaatgttgttatcagccactatctgttgggcggtgaggtgctcggagagcttctggaatccttcgcggatccacaggttgtaggggttggtgaccgagaccgaagggtatgggtcgaccttcagcgtcaggactggctggtctgggttgagggagttgatcttcaccagtttggggtaccggtcgcactcatgtgtctcttgtgttgggggccagcagtcgggggcccattcctcccagtggtcacgcatctcacgaagtactttcctgcatctcagcctctgcaggagctcgcgcgccaccgatgggagggctgccatgatgagggcaaggactgcgaacccgatgatgtaattgaccgtgtccctcgtcacgccgttcttgccgaggattccgatggcgaacgcgatgacgacaccgcccaggcacaggtgcatggggtcatgctgtgatggtttttcttcttcagcgactggtggggctatagtcatgtgtgccccttagtactaagtgatactggtgggttgcttttccccggtggccgtgtgcaagacggccaccggggttttccttcatgttcctgattttatctgcccggtgtggcgttttcatctttgtgtgggtggttcgcctggggtcttggagtgtggtgacgcggtgatggtcacggtgacggtgactgtggcgcgtggcgggtgaggtggttctttcctggtctggtgtgtggcccaggtgagtgtggtgatgagggccagggtgaggatgatgaccagggtggggagtagtttgtctggccggtgtcgccgggcttggtggcgcggcatgtttttccagggtgtgtctccgaacaggtcgtcgtcggaggggtcgtcgtggttcatagggtggccttggcgatggtggtgggcgagtttggtccaggtgatggtgccgtcggaggcgatgtggcggtcggcgggcagggtgtggacggtccatccggcgtcggtgagggcggtggtgaaggatttcttgatggatcgtttgggtaggtcgatgggggcgtgggtgccgacccagatgcaccggtttttgaggtgggtggcgccgaggtggttcatgtcgcggaccatgttttgggtgagtgtgagggtgtcggggtcccattggacggggatgatgatgtggtctgcgatggtgatggcgtgttgccaggcggcgtcgaggtcgttgtttccggtgtcgaggatgatgacgtggaagcggcttcttagggcggtgatgatgcggtcgaggtcgtcggcggtggggggtgtgatgaggctgttgtggttgtcggtgatggtgggtaggcatgtgatggtggcccagccttctggttgccaggagatgtaggggccgaggtcgcggggttgggaggcgaatcctgggtgacgggctgcgcgggcgaggtcgatgacggtgttgtcggtgtggcggggtgcgcgggtggagagggtgccgcgtgggttgatttccacgacgacgatgtcgtcgtgtcctgctgtggtggcgagggcttgggcaaggatgacggccagcggggttttgccggtgccgcctttgaggttggcgagggtgatgatgtggtcggtgagttgggcgggtgcggcggtgtggtgagggttggcggtgaggttggcgatggtgaacagggcatcgagatcgtcggtggtgttctgctcggtgggttgggggtcgccggagatgatcgggtcggcgcggcgcggctgccatgccggcctcaccactgtcacgaccaccacgggtctgctggcgctgtgtgggtgtcgtcggcgatgactcacgatcggcagtctcaccatcgtctcggtgatgctcggctagcgctggacccggtcaagttcgggccggctcacccagtggtgatgactcggtcacagaaccgctgccggtcgttatctcggacgtctcgactcctccagtcctgatgggcgttggagccacctacacctactctcagaacgaccccgacctcgtgtggggcgggggcagatgtcacttgggccaatcgagagcccaggtgatggggaaagcaggggtgtgatatctgtcctggaaaactgggcagctgctaccgtggattgacggatctccacgaaagaagggaatgcgaccatgcagatcaccgtcaagaccatcaaagatcatcgggttcgcactgtccagaccgccatgagcagcgccttggggattggttcccaggtagacatgctcgcccccggcggttccaccagctcgagttccggttcatgctgctcgtgctcgacctgcgcggtagtggcgcagcctcaagactgaacggctggtcagccccaggggcgtggcgctcatcgcgtcacgccccttctattcgctggacagggtgcgcgagctgaggaacatcgcggtgtgtgcgatgacgaggggcaggagcaagtctgtgcgggttgccaagtagccctgcgcgatggccatcacgctggccccgacggcggcgaagacacctccgatacgtcgcttcatgccgccgaattgcatcaggacgaataggactcccgcggtccacatccctccgggcatgcatctgggaaagatgaaccggaagatgatctcttcacaggagagctggagtactagcagcgtagcccccacggggagactcacctctactgacagacggatcgtcttcatccacccacccgagctggcatcgaccatttcggtggccatgcgcgaccggtggcctcgtgcctctcgctgcgtgtcgatccagccgagcagtccgtggacgctctccgctaggactcctgacgcgacagtctcaccaattcctaagcccacggcgaggaccgcgacgcccccctgcacggcaggctgtgtgacttggtggtcccaccaacccgccggcaggaccatgcgtgcgaggctgcacacgagcaggaggtggagggtcacgacgagcgacatctggaataccgcttgccgttcggcgatggtggcgttgggaaagagcggtaggccggcacgggcagcggcgctcgacagcttccgcaagagcggtttggagacgaagtagtaggcgacgtacagcgccagcgctgtcgcgatgatgatcatcggtctgccaccgagctgacccgccgatagccgtttctgttccaccaatactggctgttgtagatcaggtggcccagaacacaggcccagatcccccagaagatgaacaggatagtccccaaggcggcgagcgggatcttggagaggacctgtccccgtccgaacaccgagtggccgcaagcaaacaagagtgctcccacagcggtgagcgcgagccaggccggggttgctcgcagactgatcaccgggaccccgacccggaagccgacctcttctcctacagcgatgactagcaactgccacagcggcatgttctgaacggagcgcgcgactcgggctcgagtcacccacacgggctgttgagcgctcacatcaccactcaggtaccccggtgaggcacttcgcttagtactggggcccgatgtgcgagcattcgtgatgtgtcgcaggatccggttgtcaagccaagaggccagcagggctccggcgacagtgacgggtagcccgatcagcacgaggccccagccatgcggtgccgagaggtttctggccggcgtgcacgcgaggcaggcaaatgccatcactgccagcactacgacgtagatggtcgcataattcgacttgcgggtgacgttgccgaccatcttggccaaagtcgctggggaccagctgatgagtgcgatggtggtcagcaggaagcaggaccagacagacatccggcgcactcaggggtatgggtgcggctgtgggttttggaaaccgccatatgcggcgtagcgggggtgtgcccgcatgggtgcgctgggcagtgacagggcgagcagcccaggcgcccagagcctgacacagtgcagtcccagcccctggatctctatggtggtgaaatcttcgatgtacaggggtgacacacaggtgatgctgttgaccacgctctttaccagttccgcccccgtgtgggtgtcgtcaggtggcaggtcttcggcttgggcaatggtgcccgcgtcgaatttcgccacaactgattgcgcggcctgatagttcctcgcgtagtaggagacgttcgagtcgaggtcaagcatgtcctccgtggacatactggacgcgtcggcctcggcgtcgaaagacgtccataccgcgagcatccgaaccccgctgcactcgagaaacgccttgtacatggctgcttccagacccgcgtctgcacctaggccgacggcgacgaggggaagttggttgccactaccgaccatcatgcatgccacggtgaaatgcttgagcccgggagtcggaagccagtagaaacgcagttcgtggcttcggcccgctgcacgttccacgagccgctggatgcgctggaggcggggtccttcgacgcggatgcgcacaggtgacgaggctccataccacaggcccatcgcggcatctacctggatcaattcataagccgcggacagcgttgcggcgacgcgtgaagtgtggacggcggtgccggtcgtcacggccgttcccagccacggctcaccgtcgtgccgacgggggttgtaacccaggtaaaagaactgcgccgggatccactcctgccgggaggtcccgacacggggagtcttgacccatgtcatgggcaagtcgtcgcgataggtgtcgaacgcacctccagccactcgttgcgcgaagccgaatgcgcccagatcgagaacttcgtcctcggtccgggcgaggagttcctgacgagtcgcccagcgccgttcgaagggactatggagaatcccggtacccgcgcagtagcgctcgacggcctccgcgtagaccttgatctctgcctcaaactcgttcagccccaccccaccgatgtggtagctacccggcttggggtcgggccggtcaagcagtgcgtgcatccccgtgagttccccaccgttcacccgcacgcgggggccgagcgcggggtgcagcgagtagccgacggaagtcaccagcccgcatagcgggctgtaggtgcgccgcctgagccgggctgcggtctcgacggggtcgctatcctggcgaagcttcatcgctcgccccctgccgccagccactcacggatgtcgtagtacaggtccggagcggtttcaacctgcgctggtgcatcaaaacgggacataggtaggacgtcgttgtaggcgatctccatcgtcggtatgtagaccgacaacactttgttgcgcgtcgtgttgaggccgttgcgggcgatgctgacagcctcatgcgcgacgtgcgcggccaagatcgcgcgcaccgacgctgccacggccggcgctccggcccttacgcggtcggcagcggccacccgcatccaggacaggtagctctgccgttcgcgcaggttcatcgcgacccgctgctcgaaggtccggtaggacgaggtcgcaccagggacgacgtagggacccacgtacaaggccggcccgtctacagctgcgtggagccacgacaggtgggcgcgtcgggcgaacaggtcaagggcgcgcagcatagccgggttgttctgcgccagcgctaccacaaggagtggctgcaggtccggcgccgaacccagcaacgccaacatctgggaggcctcctgctccatgtgcaactcgtcggccgactgctcaagccgcaggcctgcgaagagggtggctgatggctgcgtgtcgtcagcgaggacggtagcctgcagcccctctccctcgagaatctgctggatatcgccggcgaggagcgcgtcgtcgctgaatacccacaccgggcgcgtctctctacctccatccatcttgtcctcaacgttttcgaccagcgcaccgatcgatgctaggtgggccatcacgtcgtcaagggccgcgcgggtcaatccgggcacccgggacacgatctcgggcggctgcagtccttggctcaacaagtccaaggccggccacagggtcccggtggcgtcgtcgtcctccagcgttgtgctctcggcgttccagacgcctcgacggaactccaccctgtccatcgagtaaggcaccatcatgaggcccggtgaaatgtggttggtcactttggctcctgtacagcctaggcttggacgcccacggtcatggtgtgggtcgcggtttggaaaatcccgtcgaggttgagtgcctgattgagttcgtcctcgtagaagcttgaggactcgactgaggcaagaccgagccccgtgcagaccaagttgatctgttgtgcgatcgccccgacttcttgaagggcgaacctcaaacccctggctccgtacttccgcatcgccctccacggcgagatgacgaacaccaagtgcactccggccgcatccgattgctccacggccggc

SEQ ID NO: 118 - DNA, 9859 bp, Propionibacterium acnes
  source 1..9859: mol_type = genomic DNA
ggggttttccttcatgttcctgattttatctgcccggtgtggcgttttcatctttgtgtgggtggttcgcctggggtcttggagtgtggtgacgcggtgatggtcacggtgacggtgactgtggcgcgtggcgggtgaggtggttctttcctggtctggtgtgtggcccaggtgagtgtggtgatgagggccagggtgaggatgatgaccagggtggggagtagtttgtctggccggtgtcgccgggcttggtggcgcggcatgtttttccagggtgtgtctccgaacaggtcgtcgtcggaggggtcgtcgtggttcatagggtggccttggcgatggtggtgggcgagtttggtccaggtgatggtgccgtcggaggcgatgtggcggtcggcgggcagggtgtggacggtccatccggcgtcggtgagggcggtggtgaaggatttcttgatggatcgtttgggtaggtcgatgggggcgtgggtgccgacccagatgcaccggtttttgaggtgggtggcgccgaggtggttcatgtcgcggaccatgttttgggtgagtgtgagggtgtcggggtcccattggacggggatgatgatgtggtctgcgatggtgatggcgtgttgccaggcggcgtcgaggtcgttgtttccggtgtcgaggatgatgacgtggaagcggcttcttagggcggtgatgatgcggtcgaggtcgtcggcggtggggggtgtgatgaggctgttgtggttgtcggtgatggtgggtaggcatgtgatggtggcccagccttctggttgccaggagatgtaggggccgaggtcgcggggttgggaggcgaatcctgggtgacgggctgcgcgggcgaggtcgatgacggtgttgtcggtgtggcggggtgcgcgggtggagagggtgccgcgtgggttgatttccacgacgacgatgtcgtcgtgtcctgctgtggtggcgagggcttgggcaaggatgacggccagcggggttttgccggtgccgcctttgaggttggcgagggtgatgatgtggtcggtgagttgggcgggtgcggcggtgtggtgagggttggcggtgaggttggcgatggtgaacagggcatcgagatcgtcggtggtgttctgctcggtgggttgggggtcgccggagatgatcgggtcggcgcggcgcggctgccatgccggcctcaccactgtcacgaccaccacgggtctgctggcgctgtgtgggtgtcgtcggcgatgactcacgatcggcagtctcaccatcgtctcggtgatgctcggctagcgctggacccggtcaagttcgggccggctcacccagtggtgatgactcggtcacagaaccgctgccggtcgttatctcggacgtctcgactcctccagtcctgatgggcgttggagccacctacacctactctcagaacgaccccgacctcgtgtggggcgggggcagatgtcacttgggccaatcgagagcccaggtgatggggaaagcaggggtgtgatatctgtcctggaaaactgggcagctgctaccgtggattgacggatctccacgaaagaagggaatgcgaccatgcagatcaccgtcaagaccatcaaagatcatcgggttcgcactgtccagaccgccatgagcagcgccttggggattggttcccaggtagacatgctcgcccccggcggttccaccagctcgagttccggttcatgctgctcgtgctcgacctgcgcggtagtggcgcagcctcaagactgaacggctggtcagccccaggggcgtggcgctcatcgcgtcacgccccttctattcgctggacagggtgcgcgagctgaggaacatcgcggtgtgtgcgatgacgaggggcaggagcaagtctgtgcgggttgccaagtagccctgcgcgatggccatcacgctggccccgacggcggcgaagacacctccgatacgtcgcttcatgccgccgaattgcatcaggacgaataggactcccgcggtccacatccctccgggcatgcatctgggaaagatgaaccggaagatgatctcttcacaggagagctggagtactagcagcgtagcccccacggggagactcacctctactgacagacggatcgtcttcatccacccacccgagctggcatcgaccatttcggtggccatgcgcgaccggtggcctcgtgcctctcgctgcgtgtcgatccagccgagcagtccgtggacgctctccgctaggactcctgacgcgacagtctcaccaattcctaagcccacggcgaggaccgcgacgcccccctgcacggcaggctgtgtgacttggtggtcccaccaacccgccggcaggaccatgcgtgcgaggctgcacacgagcaggaggtggagggtcacgacgagcgacatctggaataccgcttgccgttcggcgatggtggcgttgggaaagagcggtaggccggcacgggcagcggcgctcgacagcttccgcaagagcggtttggagacgaagtagtaggcgacgtacagcgccagcgctgtcgcgatgatgatcatcggtctgccaccgagctgacccgccgatagccgtttctgttccaccaatactggctgttgtagatcaggtggcccagaacacaggcccagatcccccagaagatgaacaggatagtccccaaggcggcgagcgggatcttggagaggacctgtccccgtccgaacaccgagtggccgcaagcaaacaagagtgctcccacagcggtgagcgcgagccaggccggggttgctcgcagactgatcaccgggaccccgacccggaagccgacctcttctcctacagcgatgactagcaactgccacagcggcatgttctgaacggagcgcgcgactcgggctcgagtcacccacacgggctgttgagcgctcacatcaccactcaggtaccccggtgaggcacttcgcttagtactggggcccgatgtgcgagcattcgtgatgtgtcgcaggatccggttgtcaagccaagaggccagcagggctccggcgacagtgacgggtagcccgatcagcacgaggccccagccatgcggtgccgagaggtttctggccggcgtgcacgcgaggcaggcaaatgccatcactgccagcactacgacgtagatggtcgcataattcgacttgcgggtgacgttgccgaccatcttggccaaagtcgctggggaccagctgatgagtgcgatggtggtcagcaggaagcaggaccagacagacatccggcgcactcaggggtatgggtgcggctgtgggttttggaaaccgccatatgcggcgtagcgggggtgtgcccgcatgggtgcgctgggcagtgacagggcgagcagcccaggcgcccagagcctgacacagtgcagtcccagcccctggatctctatggtggtgaaatcttcgatgtacaggggtgacacacaggtgatgctgttgaccacgctctttaccagttccgcccccgtgtgggtgtcgtcaggtggcaggtcttcggcttgggcaatggtgcccgcgtcgaatttcgccacaactgattgcgcggcctgatagttcctcgcgtagtaggagacgttcgagtcgaggtcaagcatgtcctccgtggacatactggacgcgtcggcctcggcgtcgaaagacgtccataccgcgagcatccgaaccccgctgcactcgagaaacgccttgtacatggctgcttccagacccgcgtctgcacctaggccgacggcgacgaggggaagttggttgccactaccgaccatcatgcatgccacggtgaaatgcttgagcccgggagtcggaagccagtagaaacgcagttcgtggcttcggcccgctgcacgttccacgagccgctggatgcgctggaggcggggtccttcgacgcggatgcgcacaggtgacgaggctccataccacaggcccatcgcggcatctacctggatcaattcataagccgcggacagcgttgcggcgacgcgtgaagtgtggacggcggtgccggtcgtcacggccgttcccagccacggctcaccgtcgtgccgacgggggttgtaacccaggtaaaagaactgcgccgggatccactcctgccgggaggtcccgacacggggagtcttgacccatgtcatgggcaagtcgtcgcgataggtgtcgaacgcacctccagccactcgttgcgcgaagccgaatgcgcccagatcgagaacttcgtcctcggtccgggcgaggagttcctgacgagtcgcccagcgccgttcgaagggactatggagaatcccggtacccgcgcagtagcgctcgacggcctccgcgtagaccttgatctctgcctcaaactcgttcagccccaccccaccgatgtggtagctacccggcttggggtcgggccggtcaagcagtgcgtgcatccccgtgagttccccaccgttcacccgcacgcgggggccgagcgcggggtgcagcgagtagccgacggaagtcaccagcccgcatagcgggctgtaggtgcgccgcctgagccgggctgcggtctcgacggggtcgctatcctggcgaagcttcatcgctcgccccctgccgccagccactcacggatgtcgtagtacaggtccggagcggtttcaacctgcgctggtgcatcaaaacgggacataggtaggacgtcgttgtaggcgatctccatcgtcggtatgtagaccgacaacactttgttgcgcgtcgtgttgaggccgttgcgggcgatgctgacagcctcatgcgcgacgtgcgcggccaagatcgcgcgcaccgacgctgccacggccggcgctccggcccttacgcggtcggcagcggccacccgcatccaggacaggtagctctgccgttcgcgcaggttcatcgcgacccgctgctcgaaggtccggtaggacgaggtcgcaccagggacgacgtagggacccacgtacaaggccggcccgtctacagctgcgtggagccacgacaggtgggcgcgtcgggcgaacaggtcaagggcgcgcagcatagccgggttgttctgcgccagcgctaccacaaggagtggctgcaggtccggcgccgaacccagcaacgccaacatctgggaggcctcctgctccatgtgcaactcgtcggccgactgctcaagccgcaggcctgcgaagagggtggctgatggctgcgtgtcgtcagcgaggacggtagcctgcagcccctctccctcgagaatctgctggatatcgccggcgaggagcgcgtcgtcgctgaatacccacaccgggcgcgtctctctacctccatccatcttgtcctcaacgttttcgaccagcgcaccgatcgatgctaggtgggccatcacgtcgtcaagggccgcgcgggtcaatccgggcacccgggacacgatctcgggcggctgcagtccttggctcaacaagtccaaggccggccacagggtcccggtggcgtcgtcgtcctccagcgttgtgctctcggcgttccagacgcctcgacggaactccaccctgtccatcgagtaaggcaccatcatgaggcccggtgaaatgtggttggtcactttggctcctgtacagcctaggcttggacgcccacggtcatggtgtgggtcgcggtttggaaaatcccgtcgaggttgagtgcctgattgagttcgtcctcgtagaagcttgaggactcgactgaggcaagaccgagccccgtgcagaccaagttgatctgttgtgcgatcgccccgacttcttgaagggcgaacctcaaacccctggctccgtacttccgcatcgccctccacggcgagatgacgaacaccaagtgcactccggccgcatccgattgctccacggccggctcgccggccatcgaattcctcacgccgcgacagccctcttcaccggtcacgggcaccagtcgatcgatgaccggcgagtagcggtagacgccgcgactcaagccggacacccgttgtgcggacatgaagatagacacgggatacagccctccaccagacgggacagcgcgtacattataccgcacgatatcaccgctcgaacgtgggacatccacgtgccccgtcacaccggcagcacctctcagaaacgcagctacgtcacgcaggtctagggattcgccggtgtagttccgtccgctgcgccggcgggcgatcacttgctcgaggggtgcgcgcaccctgctggacctgggaagttcgatcacatcggcagcgaacgtgtcgcgatccatctgtccgtacgtaacgatcatggggtcaacgaaatagtcgccgaccgagacgttgaactccatatccccccgggcgatgcgcgaggcgagcaagaagtctgcagctgcgttagacagccccggcccatcagtgttgtcgcagcggaactcgtgggtccgaaaccccacaccttccgtgcccgggctctgcgctcgatacgacgtgatcgcagaactagccttccttaaaccgcccggagtagctaccatgaccgtcccctctgaggtctcccgaacacttgcgacaatagcagcatgtgggggcagccgccagaggcgggcatccttgtctcgacaaccattgacctccggattcgatatgtgcataatcatagtcgtgccaacacgaaacgtgtacgtctcggaagacgacctagacctgttcgccgaagccaccgagatcgctggaggcctgtccgcagcggtgttggaggccttgcgcagctacgtagacaggcaccatcgcgcggccggcggattcgacgagatcgagctggagctgcagaacgacggtatcgaccaccgtgtcaccttcatgggtcgccgcctgatacacatccgccgtccagatcccgagggaacccgcatagacactgtctacttgaccgccaaacaccaattcgccgttgccaccaaaatccaacgacggctgccagactggacggccggccacgagcacatctggtccgacccggagacctggaatcgggagttctggatcgcaggtgacaagacgatggccgtgtatcccagccttgacaaactccgcgaagctgaccccaatgtggccgaacgcgccgaggccgcggtcaaaatcccgccgttcgaggtcctggacatctgatgacagaatcatcatcttcccggcggcaattggcaatgccggtgctgtcagtcacggatctagccaagaaatacgtggttcatggcggctacgaggtcccggcactcaacggtgtctcgtttgacctgcacccgggagagatgctgggtttgttcgggccaaacggtgctggaaagacgacgctggtcaggatcatcgcgggcctcttatcggcagattctggagacgtccactggggatcggatcaaggtcgggccaggttaggctacgtgtcccaaaagggtggactgcagtacgggctcacgtgccgggaagagatggtcttccacgcacaatgcttcggccagtccgccaagcaggcccggactagcgtcgacgaggtcgccgcgatgctgcactgcgattacctgatggagtgggacgtcggaaggctctccggtgggcaacgccgaatcatcgaggtagggctagcactcgtcaatcaaccatcggtcgtcctgctcgacgagcccaccctgggcctggaccccgcaacacgcctgtcgttgtggcaaacggtaaagtcggcacgccgtgagaccggtgctgccttcctcgtcaccacccactacattgacgaggtggccgagcacctgtccaacgtcagcgtgatcaaccacggaaccgtcgtcgccaacggctcgccagcgcacatccgagaaatgttcgcgaccggggaagtaacgctcggcgtggccgaggatacggtggacagtgcggtggacgtgttggctgggaccgcgttcgaggcgcaccccaccgaaaccgtcccggggatcgtggtcaggtccaggcatcccgacgtggacgcggccaagatcatcaccatcctggctggtcatggcatctcggtggactccatatccgtacgcgaggcgaccttggaagaggcgtttctcacgatcacaggcagtcgagacccggagaggcaaatcccatgaacacttgcttcaggcgatatgcggcgatgtcgctgagagcgcggcgtgatttggccctgacattcatccagcccctcgtctacctagccctcttcggaccgctcttcgtcacgacgatgaagatgtcgcagagagctaccgccgctacgggttactccctatacatcacgggcctgtccatccaaatggccatgacgatcggtgccttcgcggggctaaccatcatcctcgaataccgactcggcatcctcgaacggatctggagcacccccctcacggggagcaagatgatggcggggcgaatcgcgcgcgacgtcgttatgatgatgatgccgatactggtcgtcttcatcatcggcctggtgctgggaacacgccccagcccactgggcctggcgacctacttcgtgacagtgctcggcacaggagccacgttcgccggggtctcctacgcggtggcactcagaacgaagagcgaggcagcgctatccgcgatcttcaacctcatcctgctacccatcctcctgctgtcggggatcatgctgcccatgtcgttcgcaccacactggatcgccaccgctgcccacgtgaacccgttgtggtacctggtgcaaggcgcgcggaaccagttcagcgttctagggctcgtggcggcggccccatggagttgggctgtggccatcgtcatgtcagccgctgccttcggctgggcaagccacgaattcaacaagaggcgctgacacaaagaatggtgccgggaacccaggtccccggcaccaccgagtgcactcgcgacgtcaacgcaccgttgcggtcactgcgcaggtcgagcacgaggacgacgagcccgcgctgctgcaggtcgagccgccaggcgcgagcaggtcgacgttagcgtcggcgccgccgaagacggacgtgacggccggctgagaggtgcggatgcggtgctccagcgaggaggtggtggtgagtttcatgggaggtgctcctaggagtgagacgagaacaaaccctagcgataggttagcagtccgcaaccgactccgggaatagtagaagcgcgcatccgtagcggaagaccttagcctgattacagtgaccctgttcgcgtctcaacattattccacacccccgagcagcgaacgacaccgcgatgatgatccgtcgcctctccaccgaagaactccgcgcccacatcgcaccgggccgccgtcccgtgcatcagacctgccgtcaacgtcggccatgaagctgggaaggtggctctcgtctaggagcagacgcgggacgcctcctccaggttgggccggggaagtgtccggttcttgatgtaggtggcggtccctattgatgggcgttgaccgtgggaatgcggtcggcgaagggggtggcgaacccgttgagcgcaggcttccagcgcatgcatcaacgctgtctgccggccaccggcaagcctcacccgcccgtcatggccatcatcgaggtgccggtgaatcctcgacacatgatcccaactcccccggaggggcttccggggctgttcagccaccagatcagccaggcggcgagcccgactctgccacccggaccctgcagagcgtgcctgctgccgtcgtgtcgtgtcgggccagtgggccaccagatcggccacatccgtcttggcccatct

SEQ ID NO: 119 - DNA, 9540 bp, Propionibacterium acnes
  source 1..9540: mol_type = genomic DNA
cggtgtggcggggtgcgcgggtggagagggtgccgcgtgggttgatttccacgacgacgatgtcgtcgtgtcctgctgtggtggcgagggcttgggcaaggatgacggccagcggggttttgccggtgccgcctttgaggttggcgagggtgatgatgtggtcggtgagttgggcgggtgcggcggtgtggtgagggttggcggtgaggttggcgatggtgaacagggcatcgagatcgtcggtggtgttctgctcggtgggttgggggtcgccggagatgatcgggtcggcgcggcgcggctgccatgccggcctcaccactgtcacgaccaccacgggtctgctggcgctgtgtgggtgtcgtcggcgatgactcacgatcggcagtctcaccatcgtctcggtgatgctcggctagcgctggacccggtcaagttcgggccggctcacccagtggtgatgactcggtcacagaaccgctgccggtcgttatctcggacgtctcgactcctccagtcctgatgggcgttggagccacctacacctactctcagaacgaccccgacctcgtgtggggcgggggcagatgtcacttgggccaatcgagagcccaggtgatggggaaagcaggggtgtgatatctgtcctggaaaactgggcagctgctaccgtggattgacggatctccacgaaagaagggaatgcgaccatgcagatcaccgtcaagaccatcaaagatcatcgggttcgcactgtccagaccgccatgagcagcgccttggggattggttcccaggtagacatgctcgcccccggcggttccaccagctcgagttccggttcatgctgctcgtgctcgacctgcgcggtagtggcgcagcctcaagactgaacggctggtcagccccaggggcgtggcgctcatcgcgtcacgccccttctattcgctggacagggtgcgcgagctgaggaacatcgcggtgtgtgcgatgacgaggggcaggagcaagtctgtgcgggttgccaagtagccctgcgcgatggccatcacgctggccccgacggcggcgaagacacctccgatacgtcgcttcatgccgccgaattgcatcaggacgaataggactcccgcggtccacatccctccgggcatgcatctgggaaagatgaaccggaagatgatctcttcacaggagagctggagtactagcagcgtagcccccacggggagactcacctctactgacagacggatcgtcttcatccacccacccgagctggcatcgaccatttcggtggccatgcgcgaccggtggcctcgtgcctctcgctgcgtgtcgatccagccgagcagtccgtggacgctctccgctaggactcctgacgcgacagtctcaccaattcctaagcccacggcgaggaccgcgacgcccccctgcacggcaggctgtgtgacttggtggtcccaccaacccgccggcaggaccatgcgtgcgaggctgcacacgagcaggaggtggagggtcacgacgagcgacatctggaataccgcttgccgttcggcgatggtggcgttgggaaagagcggtaggccggcacgggcagcggcgctcgacagcttccgcaagagcggtttggagacgaagtagtaggcgacgtacagcgccagcgctgtcgcgatgatgatcatcggtctgccaccgagctgacccgccgatagccgtttctgttccaccaatactggctgttgtagatcaggtggcccagaacacaggcccagatcccccagaagatgaacaggatagtccccaaggcggcgagcgggatcttggagaggacctgtccccgtccgaacaccgagtggccgcaagcaaacaagagtgctcccacagcggtgagcgcgagccaggccggggttgctcgcagactgatcaccgggaccccgacccggaagccgacctcttctcctacagcgatgactagcaactgccacagcggcatgttctgaacggagcgcgcgactcgggctcgagtcacccacacgggctgttgagcgctcacatcaccactcaggtaccccggtgaggcacttcgcttagtactggggcccgatgtgcgagcattcgtgatgtgtcgcaggatccggttgtcaagccaagaggccagcagggctccggcgacagtgacgggtagcccgatcagcacgaggccccagccatgcggtgccgagaggtttctggccggcgtgcacgcgaggcaggcaaatgccatcactgccagcactacgacgtagatggtcgcataattcgacttgcgggtgacgttgccgaccatcttggccaaagtcgctggggaccagctgatgagtgcgatggtggtcagcaggaagcaggaccagacagacatccggcgcactcaggggtatgggtgcggctgtgggttttggaaaccgccatatgcggcgtagcgggggtgtgcccgcatgggtgcgctgggcagtgacagggcgagcagcccaggcgcccagagcctgacacagtgcagtcccagcccctggatctctatggtggtgaaatcttcgatgtacaggggtgacacacaggtgatgctgttgaccacgctctttaccagttccgcccccgtgtgggtgtcgtcaggtggcaggtcttcggcttgggcaatggtgcccgcgtcgaatttcgccacaactgattgcgcggcctgatagttcctcgcgtagtaggagacgttcgagtcgaggtcaagcatgtcctccgtggacatactggacgcgtcggcctcggcgtcgaaagacgtccataccgcgagcatccgaaccccgctgcactcgagaaacgccttgtacatggctgcttccagacccgcgtctgcacctaggccgacggcgacgaggggaagttggttgccactaccgaccatcatgcatgccacggtgaaatgcttgagcccgggagtcggaagccagtagaaacgcagttcgtggcttcggcccgctgcacgttccacgagccgctggatgcgctggaggcggggtccttcgacgcggatgcgcacaggtgacgaggctccataccacaggcccatcgcggcatctacctggatcaattcataagccgcggacagcgttgcggcgacgcgtgaagtgtggacggcggtgccggtcgtcacggccgttcccagccacggctcaccgtcgtgccgacgggggttgtaacccaggtaaaagaactgcgccgggatccactcctgccgggaggtcccgacacggggagtcttgacccatgtcatgggcaagtcgtcgcgataggtgtcgaacgcacctccagccactcgttgcgcgaagccgaatgcgcccagatcgagaacttcgtcctcggtccgggcgaggagttcctgacgagtcgcccagcgccgttcgaagggactatggagaatcccggtacccgcgcagtagcgctcgacggcctccgcgtagaccttgatctctgcctcaaactcgttcagccccaccccaccgatgtggtagctacccggcttggggtcgggccggtcaagcagtgcgtgcatccccgtgagttccccaccgttcacccgcacgcgggggccgagcgcggggtgcagcgagtagccgacggaagtcaccagcccgcatagcgggctgtaggtgcgccgcctgagccgggctgcggtctcgacggggtcgctatcctggcgaagcttcatcgctcgccccctgccgccagccactcacggatgtcgtagtacaggtccggagcggtttcaacctgcgctggtgcatcaaaacgggacataggtaggacgtcgttgtaggcgatctccatcgtcggtatgtagaccgacaacactttgttgcgcgtcgtgttgaggccgttgcgggcgatgctgacagcctcatgcgcgacgtgcgcggccaagatcgcgcgcaccgacgctgccacggccggcgctccggcccttacgcggtcggcagcggccacccgcatccaggacaggtagctctgccgttcgcgcaggttcatcgcgacccgctgctcgaaggtccggtaggacgaggtcgcaccagggacgacgtagggacccacgtacaaggccggcccgtctacagctgcgtggagccacgacaggtgggcgcgtcgggcgaacaggtcaagggcgcgcagcatagccgggttgttctgcgccagcgctaccacaaggagtggctgcaggtccggcgccgaacccagcaacgccaacatctgggaggcctcctgctccatgtgcaactcgtcggccgactgctcaagccgcaggcctgcgaagagggtggctgatggctgcgtgtcgtcagcgaggacggtagcctgcagcccctctccctcgagaatctgctggatatcgccggcgaggagcgcgtcgtcgctgaatacccacaccgggcgcgtctctctacctccatccatcttgtcctcaacgttttcgaccagcgcaccgatcgatgctaggtgggccatcacgtcgtcaagggccgcgcgggtcaatccgggcacccgggacacgatctcgggcggctgcagtccttggctcaacaagtccaaggccggccacagggtcccggtggcgtcgtcgtcctccagcgttgtgctctcggcgttccagacgcctcgacggaactccaccctgtccatcgagtaaggcaccatcatgaggcccggtgaaatgtggttggtcactttggctcctgtacagcctaggcttggacgcccacggtcatggtgtgggtcgcggtttggaaaatcccgtcgaggttgagtgcctgattgagttcgtcctcgtagaagcttgaggactcgactgaggcaagaccgagccccgtgcagaccaagttgatctgttgtgcgatcgccccgacttcttgaagggcgaacctcaaacccctggctccgtacttccgcatcgccctccacggcgagatgacgaacaccaagtgcactccggccgcatccgattgctccacggccggctcgccggccatcgaattcctcacgccgcgacagccctcttcaccggtcacgggcaccagtcgatcgatgaccggcgagtagcggtagacgccgcgactcaagccggacacccgttgtgcggacatgaagatagacacgggatacagccctccaccagacgggacagcgcgtacattataccgcacgatatcaccgctcgaacgtgggacatccacgtgccccgtcacaccggcagcacctctcagaaacgcagctacgtcacgcaggtctagggattcgccggtgtagttccgtccgctgcgccggcgggcgatcacttgctcgaggggtgcgcgcaccctgctggacctgggaagttcgatcacatcggcagcgaacgtgtcgcgatccatctgtccgtacgtaacgatcatggggtcaacgaaatagtcgccgaccgagacgttgaactccatatccccccgggcgatgcgcgaggcgagcaagaagtctgcagctgcgttagacagccccggcccatcagtgttgtcgcagcggaactcgtgggtccgaaaccccacaccttccgtgcccgggctctgcgctcgatacgacgtgatcgcagaactagccttccttaaaccgcccggagtagctaccatgaccgtcccctctgaggtctcccgaacacttgcgacaatagcagcatgtgggggcagccgccagaggcgggcatccttgtctcgacaaccattgacctccggattcgatatgtgcataatcatagtcgtgccaacacgaaacgtgtacgtctcggaagacgacctagacctgttcgccgaagccaccgagatcgctggaggcctgtccgcagcggtgttggaggccttgcgcagctacgtagacaggcaccatcgcgcggccggcggattcgacgagatcgagctggagctgcagaacgacggtatcgaccaccgtgtcaccttcatgggtcgccgcctgatacacatccgccgtccagatcccgagggaacccgcatagacactgtctacttgaccgccaaacaccaattcgccgttgccaccaaaatccaacgacggctgccagactggacggccggccacgagcacatctggtccgacccggagacctggaatcgggagttctggatcgcaggtgacaagacgatggccgtgtatcccagccttgacaaactccgcgaagctgaccccaatgtggccgaacgcgccgaggccgcggtcaaaatcccgccgttcgaggtcctggacatctgatgacagaatcatcatcttcccggcggcaattggcaatgccggtgctgtcagtcacggatctagccaagaaatacgtggttcatggcggctacgaggtcccggcactcaacggtgtctcgtttgacctgcacccgggagagatgctgggtttgttcgggccaaacggtgctggaaagacgacgctggtcaggatcatcgcgggcctcttatcggcagattctggagacgtccactggggatcggatcaaggtcgggccaggttaggctacgtgtcccaaaagggtggactgcagtacgggctcacgtgccgggaagagatggtcttccacgcacaatgcttcggccagtccgccaagcaggcccggactagcgtcgacgaggtcgccgcgatgctgcactgcgattacctgatggagtgggacgtcggaaggctctccggtgggcaacgccgaatcatcgaggtagggctagcactcgtcaatcaaccatcggtcgtcctgctcgacgagcccaccctgggcctggaccccgcaacacgcctgtcgttgtggcaaacggtaaagtcggcacgccgtgagaccggtgctgccttcctcgtcaccacccactacattgacgaggtggccgagcacctgtccaacgtcagcgtgatcaaccacggaaccgtcgtcgccaacggctcgccagcgcacatccgagaaatgttcgcgaccggggaagtaacgctcggcgtggccgaggatacggtggacagtgcggtggacgtgttggctgggaccgcgttcgaggcgcaccccaccgaaaccgtcccggggatcgtggtcaggtccaggcatcccgacgtggacgcggccaagatcatcaccatcctggctggtcatggcatctcggtggactccatatccgtacgcgaggcgaccttggaagaggcgtttctcacgatcacaggcagtcgagacccggagaggcaaatcccatgaacacttgcttcaggcgatatgcggcgatgtcgctgagagcgcggcgtgatttggccctgacattcatccagcccctcgtctacctagccctcttcggaccgctcttcgtcacgacgatgaagatgtcgcagagagctaccgccgctacgggttactccctatacatcacgggcctgtccatccaaatggccatgacgatcggtgccttcgcggggctaaccatcatcctcgaataccgactcggcatcctcgaacggatctggagcacccccctcacggggagcaagatgatggcggggcgaatcgcgcgcgacgtcgttatgatgatgatgccgatactggtcgtcttcatcatcggcctggtgctgggaacacgccccagcccactgggcctggcgacctacttcgtgacagtgctcggcacaggagccacgttcgccggggtctcctacgcggtggcactcagaacgaagagcgaggcagcgctatccgcgatcttcaacctcatcctgctacccatcctcctgctgtcggggatcatgctgcccatgtcgttcgcaccacactggatcgccaccgctgcccacgtgaacccgttgtggtacctggtgcaaggcgcgcggaaccagttcagcgttctagggctcgtggcggcggccccatggagttgggctgtggccatcgtcatgtcagccgctgccttcggctgggcaagccacgaattcaacaagaggcgctgacacaaagaatggtgccgggaacccaggtccccggcaccaccgagtgcactcgcgacgtcaacgcaccgttgcggtcactgcgcaggtcgagcacgaggacgacgagcccgcgctgctgcaggtcgagccgccaggcgcgagcaggtcgacgttagcgtcggcgccgccgaagacggacgtgacggccggctgagaggtgcggatgcggtgctccagcgaggaggtggtggtgagtttcatgggaggtgctcctaggagtgagacgagaacaaaccctagcgataggttagcagtccgcaaccgactccgggaatagtagaagcgcgcatccgtagcggaagaccttagcctgattacagtgaccctgttcgcgtctcaacattattccacacccccgagcagcgaacgacaccgcgatgatgatccgtcgcctctccaccgaagaactccgcgcccacatcgcaccgggccgccgtcccgtgcatcagacctgccgtcaacgtcggccatgaagctgggaaggtggctctcgtctaggagcagacgcgggacgcctcctccaggttgggccggggaagtgtccggttcttgatgtaggtggcggtccctattgatgggcgttgaccgtgggaatgcggtcggcgaagggggtggcgaacccgttgagcgcaggcttccagcgcatgcatcaacgctgtctgccggccaccggcaagcctcacccgcccgtcatggccatcatcgaggtgccggtgaatcctcgacacatgatcccaactcccccggaggggcttccggggctgttcagccaccagatcagccaggcggcgagcccgactctgccacccggaccctgcagagcgtgcctgctgccgtcgtgtcgtgtcgggccagtgggccaccagatcggccacatccgtcttggcccatctccagcccgccagacccagggaggccatcacctcatcgacgccgcgccgggtggtctcatcaaccccgtcaaacagctcgggccacctcgatgatgccgtccgtgaacgatccagattcatgacatgctcctcttcacagatgccgacgacgatcaggccgtggccgtggcaacggggtgacctgccggcgcggctcacgacgttgagccggaaccacacgagacgcaccagtgtgctgcgccgtcttgagtcgggcgctgtactgggccctggcgctgtggtgaacagcccgacgaagcaccgaccgccggctgtcctcatcgccagggcgaggcatggggcgcggcatggtgcgcccggtagcagcatccatgagggtgatccggtcagccaaaatgccgagccggttttcccacttccggggccacggcaccagcaggtcacgctgacagcccacgccgtggcgtcggcagtccacaacattttctcacggccaggatgcgagtgcagcagctccaccggaacaccagcatcacgcacccgccgcatcgtgacctcatcctcacg

SEQ ID NO: 120 - DNA, 1583 bp, Propionibacterium acnes
  source 1..1583: mol_type = genomic DNA
accagatcggccacatccgtcttggcccatctccagcccgccagacccagggaggccatcacctcatcgacgccgcgccgggtggtctcatcaaccccgtcaaacagctcgggccacctcgatgatgccgtccgtgaacgatccagattcatgacatgctcctcttcacagatgccgacgacgatcaggccgtggccgtggcaacggggtgacctgccggcgcggctcacgacgttgagccggaaccacacgagacgcaccagtgtgctgcgccgtcttgagtcgggcgctgtactgggccctggcgctgtggtgaacagcccgacgaagcaccgaccgccggctgtcctcatcgccagggcgaggcatggggcgcggcatggtgcgcccggtagcagcatccatgagggtgatccggtcagccaaaatgccgagccggttttcccacttccggggccacggcaccagcaggtcacgctgacagcccacgccgtggcgtcggcagtccacaacattttctcacggccaggatgcgagtgcagcagctccaccggaacaccagcatcacgcacccgccgcatcgtgacctcatcctcacgctgccgatcaccgtcaaccagatggtcagccacgatggtgttcacaccccatgactcatgcagttgcctggccaaggcgcccaacacctgctgacgcacctgtgacttgacgtcatcatcctccagatcctgtgtaccaaccatcacggaggccaacacatcactgcgttgctgaaccagggtgttgacgacgtcgacatcgtcgatacccatgggattgttggcgcgcgcggccacggcatgaaacgtgttggactgcaaattctcgaccagaccacgccgatagtcgttgaactgggaggtgtcggcaatgacaccggtcatgatgtaggccgacccctcggacaaggccctgtaggactcgtcgacgaacgccaccaaccccggccgccgccggtaaagtcgacctgcttcctcgtcagccagcaaccatgacagtttttgccccatatgtcctccttgctgacatgacctcgaacatggtaaactttccgtaggaaaaacggggcaagtactttcgagcggctacctcggcccccggtgggctgtccagccttgtgcggaccgaagccgggggattccttatgtttgcggcaatgatgccgctgcaccccctcatgccgtggtgtggtcctttccccgtgtgcggtgtggtgcgtcgttgactggtttgtggccccgagccttactctgaccggtaggagaacggtgtggggtctacggatagcccactcggctcccggtggaatgtccaacagggtagggttgatgagttggtccatcaggaccgtcccggtggctgcgtcaatgatcgatatttcgatgatgcgcccgtccaggtcggtggtttcggtgtcgaggatgactccgactccgggttctaggagttggggatccaatgggtggtcatcgtgtggctcctacagggagtgtctgggctggacagcggtgcaatacccgcgccatagcggttttttctgcggg

SEQ ID NO: 121 - DNA, 6610 bp, Propionibacterium acnes
  source 1..6610: mol_type = genomic DNA
gtgttccagtgcctcgcgggcgtgatgttcttcttcggcaccttcttgccacatgcttcgcgcttcagcctcgccatccaagcgaacctggactgtgaacgagtcctcatcgggtccgtcctcattccacgcggcaatgatcccacgggcctcgtctgcgacctgactcaacttcatcgcctgcccgacagccccgagagccggaatctcgaacacccagatattcgcctcagccgagacctcacgatgggcgatcacttcgtaggtcgtctcaccttctactgtcgtgtccattacttccactccttcggaattttcacgcctgctcgctccagctgtgccaggacaccaactgacgtcagctggtgtcctgctggtatcgatacgcgcccggctccgccggggcgtccccagatttcatggcttcccttggcgttccgcagacgggcccatccttgagaacggagcagcttgaggacgtccttagttttctgcggtttcacacatcatagtatagccccacttaacttgtaaactaagcccctgtttacattttagttggtgcatgtgatccctgctcttatgacgtcgcccgacctggcgccttagacatgcactgttcatcctcaaccacactcaccgtcacgggtccgaaggcgaggtctatcaccattcgcatcgatgaagttgaagcaggatcgtccgcatcacgcactgccgatccggacagacgccaccggccgtaccgactgtttacgatctgccaccgcagactgctgccataaccgctatcacctctgatagtacgtttagtactatcagaggtgattcaagattctcctgtcgagcagccctacagtcacgaagtcctgcgatcgtcatcgcttaaggcagacggatggccatcggggaccactcgcaaagcaggggcgatcagcaacagtgatgtgccatgagcaagtactggtgcaccggctgtttactccgcccctagataaaccacgggtgcaggggtggacaccacaccatgaccgatgtggtgcccaccccatggctcacaggcaggccctatcgccgggagcactgctgcagatgaggctcagtaacctgccatgtctcacctggggccaaggtgccaagctccccacggaatctcaggcatcggaaaccagcagccgaacttccacagcatgagcgccctacgaaaaagcaggccgccgacggttctcaagaactcgccggcggcctgcatcgccactcgaactgtaaccgtggtccgaccccgtgcacaggtaagctccacactcccaccaggcatggccgaggcagtaccaagttgccgtggcccatcggcagatttggttaaattttgaaaagtcatatagactccttctgtaaatttttaaatctcataggactctcgccatcgccagccagcttcgacaggagtcccgatgtttcaccgagtgaaatatcggcaccgtttgagttgacctaaagctcaaaagatgctagaatccatcttacctcgttaggggcgttttgtcaaacgcccctatattgcgtgtcttcgcgcgtcgtagcgctgatgctgcgcctgtgtcgactatccgtttgtaagtactttcgatgacaccagcagtggctactcatgactggtgcgtgcgggtctaaagcagcagggaaaggaatcgcagtagaagccgcttgattcctatcacccctgatggtactatcagtactaacagagcagggcttactcgatgcgtgagaatcggggacatgctgagcctctcgtaggtcattggcctgctgggcgtcagtgtggcgcggttcgatccagtgaactctatcagctctgttagtactgtcagagttgatatattcgaccccaggaggagcccatgagttacatcgttcgcaccggaaatttggtcgacacccccgagctgcgtgagggagagcatggcccgtacacctacgctcgcgtcatcgtgtccgatcgcattcgccaggaggacggcagctacgtcaacgggccagcgatcgcctacgacgtcttggcgggtggcagccaagccgtgaatctggttgaagccgccaaggcgagcggcaacatccgcatcatgttcgcgggccgttaccgcgtcaccgagtggcggggtgagcagggcactcgtatccagcatgaggtccgagccgacgaagtgagcgtgagcctgctcggtcagagggtgaccgtggagcggcctcgaggtgacgtggcatccaaggagagcacgtcgttctgattgagtccgggggcacggtggtcgccgtggtaaaccgtgcccctgacagtactattgacactattggaggtatcagtgtgactgctcaaattttcgccttgtgcaaccagaagggtggcgtcggaaagtcgacatcgacgtttcatctggcccgtgccgcggtgttgcgtggccagcgtgtgcttgtcgtcgacaacgacccccagggcaacctgacgtctgtcgcggccgccgagcccgtgggggaggatcaggcggggctggccgatgtgctcagcgcgcgtgctccagagaccctccgcgatgtgatcgtgccgggaatctggtctggcctcgatgtcgtgccgacgtctggcatcacgctcggctgggtgcgtgacgaactcgtgatcgccggtgccggccgagaaggccggctgcgggaggccctggccggcgtcgaggacgactacgacgtgatcctgatcgactgtgctccatcgctcgatcagctcacgatcaacggcctggtggccgcccagggtgtcatcgtcgtgacgcactcgaagttgtggagcgccaacggcctcgcccagctgctcgacaccatcgacagcgtgcgcagctactacaacggcgcgctgcgcgtggcgggcatcatcgtcaaccagcacgaggagaacaccatcagcgggaaaacctggctcgacgagctgcatcaggctgccgagtcccggaagctgaccgtgcttgacccgccgatccccaagcgtgtcgtcatcgccgataccgtcgaggccgcgcgcggtctcgacgagtggggaagtgccgaggcggccgcgctcggccagttgtacgcccaccacctgacctgcatcgaaggagccctgtgatgacccgtccagccccccgaaagtcctcattgagcggatcaactccggtcgccccgccggctcagacggcgccggcaccgtctgccgcacctaccccccacaaggccgatgagtcacagacgagcagcaccacgaggaagtggcggcacaaggtgtcgttctaccaggacccggccgacaccgaccgggtgcgcggggcgatcctttacacgatgacgaccgagggcaaccggaacctgagccagttcgtcaacgatgccgtcatggccaaggtggtcgagctggaagtcaagtacaacgatggccagccattccccgctgtgggagcccgaggactaccccagggcggtgcagccgccgccggtgagtagaggaccatcgaccgtcgggggcttcaccatgcccccgaccctcggtcatcctgatcctcttgtcgatggtggtgacagtgggggattcacgcctcgttcagatcagaggaagtctcaccgcgtgattagtactatcaaatctgacagtactaacagagcagatagggttccctaggtcgagctgtatcacgccgacaaccagtgagccagtgatctacgaggggcgcaatatgcacccgatcggtagccgcgaaggcctcgccctgccccgatagtactatcaccactatcaatggtgctagtggtgagtttcttccattgatgacaacagcacagtgctgccgtctgtgtgcgggccaccagcccgcacacagttgccgtcgaggacgttgttcatgctctgtggtggccggtcctgagggcggctcgcaggatctcccggcgctcacggcgacgagcctggtagccaaggtctgcatgttcggcggcgagacgggctttgagggttgcggcttctgcacggcggtggagttggtcgtcgatgagttgggcgcgggccagacgccgcttatgggggttgtcgtgggtgaggggggcgtcgaggctgccgtcgtgggttagggccagggctgctcgttcggcgtcgtcgaggccgatgtggtggacggtcacgggtgcggtggtgacgtcgaggatgtccaggtggatgttgtggccgccgccgggggcttcggggaagtctggtgggctggcctggccggtgtcggggtcataccaggacaggccgatgatctcggcccagggtgggggcgggcagacggctcgcagaagggtgtgggccaggaacgtgttgcgggccatgatgcctccaagggtgaaaagcagtcgagtagcgatgacggcggggtagccgtctgctgggctgaggccgaccgggcccatgtcctcgatgctcttgtgctgcggccataccccaaagctaccaaacagtctttttaatctcaaagatacaaacagtgcttgacatattatctgcagcgaaagatactttcatcatggtggctgatcatgattacgcgactcctgacgatgagtggatgacacctcctcaggtggcccgtgtgattccgaacaccactgctcaggctgtccggcgctgggctgaggagggtcagcttcctggggcgtttcgtactccttctgggcgttggcatattccgtggtcggctgtggtgggcatcatggggtttgatccgcgtgagtccgcatcaccgagtgatcgtcaccagagctgacagagtcgtcgatgagctttcgagtgcagagctgatggcacgacggtctggatacttgtggagatgagagacgaccacatccagtcatggtcggggtacaccgaggggcagattcagcagtgctggcacgatgaggttgcccctgccattgactcgctcatggagcaggtaaggtctgttgccgagactcctgtgccgccgggttcgagattttacggcgatgagcagtgggccaagccttttcatccgtctactgcgatctgcggttcaatgggtccgccagcgatcacttgcacgcgctgaagctcctcgtctgggaagcgaacgtccaccatgtctatgcgccgtacacccttgctcgtgcatctattgaggcatcgtctactgctgtgtggctgttgagcacgaagacgcgcggagaacgtgtgctgcgagccttgcgatggtacgcgcaggattgtcacgactcgtgcaggttcatggatgatgagcagtatcgtgaccacctattgcggcgcattgaggggactgtcgctgcgggaaatctcgactcgcgcgctgctaggaaacggtaccgtgcaaccgatgttgtcgatgaggctgatcagctggttcccggaactctgagggcgtggcgagctttttctggtatggcccattcccgtatgtgggcatccagggggctgctcgacatggaagtgctgtccagtggccaaggaatggttacggcgaaggtgacgagcggatcggcccaaatcctttgggccgtcgtggcagctctgaatgttgctctcagtgccgctcgcttgtggcgtgattcgatgtgctcaccgtttgctgttgcccagtcggtagacgcgatgccagaggcgtttcgccgccctgtttagggtctgatcggggtagtgggtgttcacggggtcccaggttggccatggggcggcttggtgatgtgagttgggttgtgtggcagcctgggtgttgggtgtggcttcgttggccacgaaggcatgctcttccttgtgctgggacttgagtccccagtgctctcccctttgctagtggggggtggggtccccggaggtaggtcctccggggactttttctatgtctgtccgtgccccaggatttcgtatctaggcagtaccaattttgggttagttggaggtttctttggtaatggacagggtgagggtgatgaagaggtggccgtccttggtggcagaaattttctcgaacttcagctgaatgttgttatcagccactatctgttgggcggtgaggtgctcggagagcttctggaatccttcgcggatccacaggttgtaggggttggtgaccgagaccgaagggtatgggtcgaccttcagcgtcaggactggctggtctgggttgagggagttgatcttcaccagtttggggtaccggtcgcactcatgtgtctcttgtgttgggggccagcagtcgggggcccattcctcccagtggtcacgcatctcacgaagtactttcctgcatctcagcctctgcaggagctcgcgcgccaccgatgggagggctgccatgatgagggcaaggactgcgaacccgatgatgtaattgaccgtgtccctcgtcacgccgttcttgccgaggattccgatggcgaacgcgatgacgacaccgcccaggcacaggtgcatggggtcatgctgtgatggtttttcttcttcagcgactggtggggctatagtcatgtgtgccccttagtactaagtgatactggtgggttgcttttcccc

SEQ ID NO: 122 - DNA, 4467 bp, Propionibacterium acnes
  source 1..4467: mol_type = genomic DNA
cgcgcgcggtctcgacgagtggggaagtgccgaggcggccgcgctcggccagttgtacgcccaccacctgacctgcatcgaaggagccctgtgatgacccgtccagccccccgaaagtcctcattgagcggatcaactccggtcgccccgccggctcagacggcgccggcaccgtctgccgcacctaccccccacaaggccgatgagtcacagacgagcagcaccacgaggaagtggcggcacaaggtgtcgttctaccaggacccggccgacaccgaccgggtgcgcggggcgatcctttacacgatgacgaccgagggcaaccggaacctgagccagttcgtcaacgatgccgtcatggccaaggtggtcgagctggaagtcaagtacaacgatggccagccattccccgctgtgggagcccgaggactaccccagggcggtgcagccgccgccggtgagtagaggaccatcgaccgtcgggggcttcaccatgcccccgaccctcggtcatcctgatcctcttgtcgatggtggtgacagtgggggattcacgcctcgttcagatcagaggaagtctcaccgcgtgattagtactatcaaatctgacagtactaacagagcagatagggttccctaggtcgagctgtatcacgccgacaaccagtgagccagtgatctacgaggggcgcaatatgcacccgatcggtagccgcgaaggcctcgccctgccccgatagtactatcaccactatcaatggtgctagtggtgagtttcttccattgatgacaacagcacagtgctgccgtctgtgtgcgggccaccagcccgcacacagttgccgtcgaggacgttgttcatgctctgtggtggccggtcctgagggcggctcgcaggatctcccggcgctcacggcgacgagcctggtagccaaggtctgcatgttcggcggcgagacgggctttgagggttgcggcttctgcacggcggtggagttggtcgtcgatgagttgggcgcgggccagacgccgcttatgggggttgtcgtgggtgaggggggcgtcgaggctgccgtcgtgggttagggccagggctgctcgttcggcgtcgtcgaggccgatgtggtggacggtcacgggtgcggtggtgacgtcgaggatgtccaggtggatgttgtggccgccgccgggggcttcggggaagtctggtgggctggcctggccggtgtcggggtcataccaggacaggccgatgatctcggcccagggtgggggcgggcagacggctcgcagaagggtgtgggccaggaacgtgttgcgggccatgatgcctccaagggtgaaaagcagtcgagtagcgatgacggcggggtagccgtctgctgggctgaggccgaccgggcccatgtcctcgatgctcttgtgctgcggccataccccaaagctaccaaacagtctttttaatctcaaagatacaaacagtgcttgacatattatctgcagcgaaagatactttcatcatggtggctgatcatgattacgcgactcctgacgatgagtggatgacacctcctcaggtggcccgtgtgattccgaacaccactgctcaggctgtccggcgctgggctgaggagggtcagcttcctggggcgtttcgtactccttctgggcgttggcatattccgtggtcggctgtggtgggcatcatggggtttgatccgcgtgagtccgcatcaccgagtgatcgtcaccagagctgacagagtcgtcgatgagctttcgagtgcagagctgatggcacgacggtctggatacttgtggagatgagagacgaccacatccagtcatggtcggggtacaccgaggggcagattcagcagtgctggcacgatgaggttgcccctgccattgactcgctcatggagcaggtaaggtctgttgccgagactcctgtgccgccgggttcgagattttacggcgatgagcagtgggccaagccttttcatccgtctactgcgatctgcggttcaatgggtccgccagcgatcacttgcacgcgctgaagctcctcgtctgggaagcgaacgtccaccatgtctatgcgccgtacacccttgctcgtgcatctattgaggcatcgtctactgctgtgtggctgttgagcacgaagacgcgcggagaacgtgtgctgcgagccttgcgatggtacgcgcaggattgtcacgactcgtgcaggttcatggatgatgagcagtatcgtgaccacctattgcggcgcattgaggggactgtcgctgcgggaaatctcgactcgcgcgctgctaggaaacggtaccgtgcaaccgatgttgtcgatgaggctgatcagctggttcccggaactctgagggcgtggcgagctttttctggtatggcccattcccgtatgtgggcatccagggggctgctcgacatggaagtgctgtccagtggccaaggaatggttacggcgaaggtgacgagcggatcggcccaaatcctttgggccgtcgtggcagctctgaatgttgctctcagtgccgctcgcttgtggcgtgattcgatgtgctcaccgtttgctgttgcccagtcggtagacgcgatgccagaggcgtttcgccgccctgtttagggtctgatcggggtagtgggtgttcacggggtcccaggttggccatggggcggcttggtgatgtgagttgggttgtgtggcagcctgggtgttgggtgtggcttcgttggccacgaaggcatgctcttccttgtgctgggacttgagtccccagtgctctcccctttgctagtggggggtggggtccccggaggtaggtcctccggggactttttctatgtctgtccgtgccccaggatttcgtatctaggcagtaccaattttgggttagttggaggtttctttggtaatggacagggtgagggtgatgaagaggtggccgtccttggtggcagaaattttctcgaacttcagctgaatgttgttatcagccactatctgttgggcggtgaggtgctcggagagcttctggaatccttcgcggatccacaggttgtaggggttggtgaccgagaccgaagggtatgggtcgaccttcagcgtcaggactggctggtctgggttgagggagttgatcttcaccagtttggggtaccggtcgcactcatgtgtctcttgtgttgggggccagcagtcgggggcccattcctcccagtggtcacgcatctcacgaagtactttcctgcatctcagcctctgcaggagctcgcgcgccaccgatgggagggctgccatgatgagggcaaggactgcgaacccgatgatgtaattgaccgtgtccctcgtcacgccgttcttgccgaggattccgatggcgaacgcgatgacgacaccgcccaggcacaggtgcatggggtcatgctgtgatggtttttcttcttcagcgactggtggggctatagtcatgtgtgccccttagtactaagtgatactggtgggttgcttttccccggtggccgtgtgcaagacggccaccggggttttccttcatgttcctgattttatctgcccggtgtggcgttttcatctttgtgtgggtggttcgcctggggtcttggagtgtggtgacgcggtgatggtcacggtgacggtgactgtggcgcgtggcgggtgaggtggttctttcctggtctggtgtgtggcccaggtgagtgtggtgatgagggccagggtgaggatgatgaccagggtggggagtagtttgtctggccggtgtcgccgggcttggtggcgcggcatgtttttccagggtgtgtctccgaacaggtcgtcgtcggaggggtcgtcgtggttcatagggtggccttggcgatggtggtgggcgagtttggtccaggtgatggtgccgtcggaggcgatgtggcggtcggcgggcagggtgtggacggtccatccggcgtcggtgagggcggtggtgaaggatttcttgatggatcgtttgggtaggtcgatgggggcgtgggtgccgacccagatgcaccggtttttgaggtgggtggcgccgaggtggttcatgtcgcggaccatgttttgggtgagtgtgagggtgtcggggtcccattggacggggatgatgatgtggtctgcgatggtgatggcgtgttgccaggcggcgtcgaggtcgttgtttccggtgtcgaggatgatgacgtggaagcggcttcttagggcggtgatgatgcggtcgaggtcgtcggcggtggggggtgtgatgaggctgttgtggttgtcggtgatggtgggtaggcatgtgatggtggcccagccttctggttgccaggagatgtaggggccgaggtcgcggggttgggaggcgaatcctgggtgacgggctgcgcgggcgaggtcgatgacggtgttgtcggtgtggcggggtg

SEQ ID NO: 123 - DNA, 3927 bp, Propionibacterium acnes
  source 1..3927: mol_type = genomic DNA
gtgttccagtgcctcgcgggcgtgatgttcttcttcggcaccttcttgccacatgcttcgcgcttcagcctcgccatccaagcgaacctggactgtgaacgagtcctcatcgggtccgtcctcattccacgcggcaatgatcccacgggcctcgtctgcgacctgactcaacttcatcgcctgcccgacagccccgagagccggaatctcgaacacccagatattcgcctcagccgagacctcacgatgggcgatcacttcgtaggtcgtctcaccttctactgtcgtgtccattacttccactccttcggaattttcacgcctgctcgctccagctgtgccaggacaccaactgacgtcagctggtgtcctgctggtatcgatacgcgcccggctccgccggggcgtccccagatttcatggcttcccttggcgttccgcagacgggcccatccttgagaacggagcagcttgaggacgtccttagttttctgcggtttcacacatcatagtatagccccacttaacttgtaaactaagcccctgtttacattttagttggtgcatgtgatccctgctcttatgacgtcgcccgacctggcgccttagacatgcactgttcatcctcaaccacactcaccgtcacgggtccgaaggcgaggtctatcaccattcgcatcgatgaagttgaagcaggatcgtccgcatcacgcactgccgatccggacagacgccaccggccgtaccgactgtttacgatctgccaccgcagactgctgccataaccgctatcacctctgatagtacttttagtactatcagaggtgattcaagattctcctgtcgagcagccctacagtcacgaagtcctgcgatcgtcatcgcttaaggtagacggatggccatcggggaccactcgcaaagcaggggcgatcagcaacagtgatgtgccatgagcaagtactggtgcaccggctgtttactccgcccctagataaaccacgggtgcaggggtggacaccacaccatgaccgatgtggtgcccaccccatggctcacaggcaggccctatcgccgggagcactgctgcagatgaggctcagtaacctgccatgtctcacctggggccaaggtgccaagctccccacggaatctcaggcatcggaaaccagcagccgaacttccacagcatgagcgccctacgaaaaagcaggccgccgacggttctcaagaactcgccggcggcctgcatcgccactcgaactgtaaccgtggtccgaccccgtgcacaggtaagctccacactcccaccaggcatggccgaggcagtaccaagttgccgtggcccatcggcagatttggttaaattttgaaaagtcatatagactccttctgtaaatttttaaatctcataggactctcgccatcgccagccagcttcgacaggagtcccgatgtttcaccgagtgaaatatcggcaccgtttgagttgacctaaagctcaaaagatgctagaatccatcttacctcgttaggggcgttttgtcaaacgcccctatattgcgtgtcttcgcgcgtcgtagcgctgatgctgcgcctgtgtcgactatccgtttgtaagtactttcgatgacaccagcagtggctactcatgactggtgcgtgcgggtctaaagcagcagggaaaggaatcgcagtagaagccgcttgattcctatcacccctgatggtactatcagtactaacagagcagggcttactcgatgcgtgagaatcggggacatgctgagcctctcgtaggtcattggcctgctgggcgtcagtgtggcgcggttcgatccagtgaactctatcagctctgttagtactgtcagagttgatatattcgaccccaggaggagcccatgagttacatcgttcgcaccggaaatttggtcgacacccccgagctgcgtgagggagagcatggcccgtacacctacgctcgcgtcatcgtgtccgatcgcattcgccaggaggacggcagctacgtcaacgggccagcgatcgcctacgacgtcttggcgggtggcagccaagccgtgaatctggttgaagccgccaaggcgagcggcaacatccgcatcatgttcgcgggccgttaccgcgtcaccgagtggcggggtgagcagggcactcgtatccagcatgaggtccgagccgacgaagtgagcgtgagcctgctcggtcagagggtgaccgtggagcggcctcgaggtgacgtggcatccaaggagagcacgtcgttctgattgagtccgggggcacggtggtcgccgtggtaaaccgtgcccctgacagtactattgacactattggaggtatcagtgtgactgctcaaattttcgccttgtgcaaccagaagggtggcgtcggaaagtcgacatcgacgtttcatctggcccgtgccgcggtgttgcgtggccagcgtgtgcttgtcgtcgacaacgacccccagggcaacctgacgtctgtcgcggccgccgagcccgtgggggaggatcaggcggggctggccgatgtgctcagcgcgcgtgctccagagaccctccgcgatgtgatcgtgccgggaatctggtctggcctcgatgtcgtgccgacgtttggcatcacgctcggctgggtgcgtgacgaactcgtgatcgccggtgccggccgagaaggccggctgcgggaggccctggccggcgtcgaggacgactacgacgtgatcctgatcgactgtgctccatcgctcgatcagctcacgatcaacggcctggtggccgcccagggtgtcatcgtcgtgacgcactcgaagttgtggagcgccaacggcctcgcccagctgctcgacaccatcgacagcgtgcgcagctactacaacggcgcgctgcgcgtggcgggcatcatcgtcaaccagcacgaggagaacaccatcagcgggaaaacctggctcgacgagctgcatcaggctgccgagtcccggaagctgaccgtgcttgacccgccgatccccaagcgtgtcgtcatcgccgataccgtcgaggccgcgcgcggtctcgacgagtggggaagtgccgaggcggccgcgctcggccagttgtacgcccaccacctgacctgcatcgaaggagccctgtgatgacccgtccagccccccgaaagtcctcattgagcggatcaactccggtcgccccgccggctcagacggcgccggcaccgtctgccgcacctaccccccacaaggccgatgagtcacagacgagcagcaccacgaggaagtggcggcacaaggtgtcgttctaccaggacccggccgacaccgaccgggtgcgcggggcgatcctttacacgatgacgaccgagggcaaccggaacctgagccagttcgtcaacgatgccgtcatggccaaggtggtcgagctggaagtcaagtacaacgatggccagccattccccgctgtgggagcccgaggactaccccagggcggtgcagccgccgccggtgagtagaggaccatcgaccgtcgggggcttcaccatgcccccgaccctcggtcatcctgatcctcttgtcgatggtggtgacagtgggggattcacgcctcgttcagatcagaggaagtctcaccgcgtgattagtactatcaaatctgacagtactaacagagcagatagggttccctaggtcgagctgtatcacgccgacaaccagtgagccagtgatctacgaggggcgcaatatgcacccgatcggtagccgcgaaggcctcgccctgccccgatagtactatcaccactatcaatggtgctagtggtgagtttcttccattgatgacaacagcacagtgctgccgtctgtgtgcgggccaccagcccgcacacagttgccgtcgaggacgttgt

SEQ ID NO: 124 - DNA, 3842 bp, Propionibacterium acnes
  source 1..3842: mol_type = genomic DNA
cactccggccgcatccgattgctccacggccggctcgccggccatcgaattcctcacgccgcgacagccctcttcaccggtcacgggcaccagtcgatcgatgaccggcgagtagcggtagacgccgcgactcaagccggacacccgttgtgcggacatgaagatagacacgggatacagccctccaccagacgggacagcgcgtacattataccgcacgatatcaccgctcgaacgtgggacatccacgtgccccgtcacaccggcagcacctctcagaaacgcagctacgtcacgcaggtctagggattcgccggtgtagttccgtccgctgcgccggcgggcgatcacttgctcgaggggtgcgcgcaccctgctggacctgggaagttcgatcacatcggcagcgaacgtgtcgcgatccatctgtccgtacgtaacgatcatggggtcaacgaaatagtcgccgaccgagacgttgaactccatatccccccgggcgatgcgcgaggcgagcaagaagtctgcagctgcgttagacagccccggcccatcagtgttgtcgcagcggaactcgtgggtccgaaaccccacaccttccgtgcccgggctctgcgctcgatacgacgtgatcgcagaactagccttccttaaaccgcccggagtagctaccatgaccgtcccctctgaggtctcccgaacacttgcgacaatagcagcatgtgggggcagccgccagaggcgggcatccttgtctcgacaaccattgacctccggattcgatatgtgcataatcatagtcgtgccaacacgaaacgtgtacgtctcggaagacgacctagacctgttcgccgaagccaccgagatcgctggaggcctgtccgcagcggtgttggaggccttgcgcagctacgtagacaggcaccatcgcgcggccggcggattcgacgagatcgagctggagctgcagaacgacggtatcgaccaccgtgtcaccttcatgggtcgccgcctgatacacatccgccgtccagatcccgagggaacccgcatagacactgtctacttgaccgccaaacaccaattcgccgttgccaccaaaatccaacgacggctgccagactggacggccggccacgagcacatctggtccgacccggagacctggaatcgggagttctggatcgcaggtgacaagacgatggccgtgtatcccagccttgacaaactccgcgaagctgaccccaatgtggccgaacgcgccgaggccgcggtcaaaatcccgccgttcgaggtcctggacatctgatgacagaatcatcatcttcccggcggcaattggcaatgccggtgctgtcagtcacggatctagccaagaaatacgtggttcatggcggctacgaggtcccggcactcaacggtgtctcgtttgacctgcacccgggagagatgctgggtttgttcgggccaaacggtgctggaaagacgacgctggtcaggatcatcgcgggcctcttatcggcagattctggagacgtccactggggatcggatcaaggtcgggccaggttaggctacgtgtcccaaaagggtggactgcagtacgggctcacgtgccgggaagagatggtcttccacgcacaatgcttcggccagtccgccaagcaggcccggactagcgtcgacgaggtcgccgcgatgctgcactgcgattacctgatggagtgggacgtcggaaggctctccggtgggcaacgccgaatcatcgaggtagggctagcactcgtcaatcaaccatcggtcgtcctgctcgacgagcccaccctgggcctggaccccgcaacacgcctgtcgttgtggcaaacggtaaagtcggcacgccgtgagaccggtgctgccttcctcgtcaccacccactacattgacgaggtggccgagcacctgtccaacgtcagcgtgatcaaccacggaaccgtcgtcgccaacggctcgccagcgcacatccgagaaatgttcgcgaccggggaagtaacgctcggcgtggccgaggatacggtggacagtgcggtggacgtgttggctgggaccgcgttcgaggcgcaccccaccgaaaccgtcccggggatcgtggtcaggtccaggcatcccgacgtggacgcggccaagatcatcaccatcctggctggtcatggcatctcggtggactccatatccgtacgcgaggcgaccttggaagaggcgtttctcacgatcacaggcagtcgagacccggagaggcaaatcccatgaacacttgcttcaggcgatatgcggcgatgtcgctgagagcgcggcgtgatttggccctgacattcatccagcccctcgtctacctagccctcttcggaccgctcttcgtcacgacgatgaagatgtcgcagagagctaccgccgctacgggttactccctatacatcacgggcctgtccatccaaatggccatgacgatcggtgccttcgcggggctaaccatcatcctcgaataccgactcggcatcctcgaacggatctggagcacccccctcacggggagcaagatgatggcggggcgaatcgcgcgcgacgtcgttatgatgatgatgccgatactggtcgtcttcatcatcggcctggtgctgggaacacgccccagcccactgggcctggcgacctacttcgtgacagtgctcggcacaggagccacgttcgccggggtctcctacgcggtggcactcagaacgaagagcgaggcagcgctatccgcgatcttcaacctcatcctgctacccatcctcctgctgtcggggatcatgctgcccatgtcgttcgcaccacactggatcgccaccgctgcccacgtgaacccgttgtggtacctggtgcaaggcgcgcggaaccagttcagcgttctagggctcgtggcggcggccccatggagttgggctgtggccatcgtcatgtcagccgctgccttcggctgggcaagccacgaattcaacaagaggcgctgacacaaagaatggtgccgggaacccaggtccccggcaccaccgagtgcactcgcgacgtcaacgcaccgttgcggtcactgcgcaggtcgagcacgaggacgacgagcccgcgctgctgcaggtcgagccgccaggcgcgagcaggtcgacgttagcgtcggcgccgccgaagacggacgtgacggccggctgagaggtgcggatgcggtgctccagcgaggaggtggtggtgagtttcatgggaggtgctcctaggagtgagacgagaacaaaccctagcgataggttagcagtccgcaaccgactccgggaatagtagaagcgcgcatccgtagcggaagaccttagcctgattacagtgaccctgttcgcgtctcaacattattccacacccccgagcagcgaacgacaccgcgatgatgatccgtcgcctctccaccgaagaactccgcgcccacatcgcaccgggccgccgtcccgtgcatcagacctgccgtcaacgtcggccatgaagctgggaaggtggctctcgtctaggagcagacgcgggacgcctcctccaggttgggccggggaagtgtccggttcttgatgtaggtggcggtccctattgatgggcgttgaccgtgggaatgcggtcggcgaagggggtggcgaacccgttgagcgcaggcttccagcgcatgcatcaacgctgtctgccggccaccggcaagcctcacccgcccgtcatggccatcatcgaggtgccggtgaaccctcgacacatgaccccaccccccccggaggggcttccggggctgttcagccacc

SEQ ID NO: 125 - DNA, 3694 bp, Propionibacterium acnes
  source 1..3694: mol_type = genomic DNA
cacccgccgcatcgtgacctcatcctcacgtgccaccagcgggggagagcgactaccgctgcagccggtccaaagcgactcttcacagatgagggggtggatcggtagctgacccctaggtcctgatgtgggtcgaggtccttggaatgatggaagttcctacacacccatcgccaaagacctcaacatggacaacgctaccttcaccactccctcatctgtgaagagccagtttatgcacggtgttgaaagaggcgtcggtctacgacgaatgcgggttaatggtcttgcggtgtggggcgctgggcgatggcatcgagaacgcgtgagtgggtggcgatccattcggccgcgtcggggttgatgttgcgggcgacggtgtcgatcgctgttacgtagtgggcaagcctgcgaatctcagcttgttggtcagggtgagcgctgatgagaggctcttgatgggaggcgcggttacggacgtggcggatgagctccacgttttcctcgaagtcgcgtcggctacgccccgggtagtgaggcatacctccgttacgtaagtcagtgagagctttccatacggttgcttccaggcgcggggtgagcagaaagcgccagttgtccagtgacagactcgccacgatctgatcaggggtcgcatcgagcctcgcgcgccgcagtcgcttctcggccctggcgacgttacgcgggaaaccaccgagccgatagctcggggattcccaccaacgccgtatgccagtatcggcgctcaggcgcacgtcaatgaagtttctcaggagtacctcgacatggctgatgtcttccaagaacgctttcgagatgcgggtgttccacacgtaccacgcatcgactggttcgatccggtagcgtctgagcctggcgggtgagaaccactcctgcaacgtctcacgactcaccgtgggagcgtggtaggattgatgacgataggcctcgggaaggtcaatgccgcgaaatatcggtatacccccgaggtcattgttttgcccaggcccctcctcgcatacttgcggggcgtcattggctgccgtcatctcgtctcttcccggtacgtggctgtccatgttcacgggcaggtacggcaatgaggttcccgcacacaaacctctaccaagcatacgctggcaagcccccctctcggccccaccacaacatcaattgctgactcgaacacctttgaggcagcgctttcggcttgcgcaaccccacccacgacaccgtccgcttactactcgaagttgagggattcagaccccacctacaccctcgattgtgaagagcctccaaagcccgatacaacgtctggcgagacaccgtgaacgacctcgccaccgcagcaacgcaccagcagcgcgggatggcttggtattagcccagcgcagggcccccaggcaccagccctaacgaccccgcacccgacgtggctagaggataagccgcacgggaggactccatacccgccgactcattccagcccgccaccagccgagccatatgatcaaccgcccgcggtaaataatccagccactcacgccggtcgtacaaggaaccggccccgctccaggcgtgtgcccaggatcgccacaacacgtcgagctcgaccaccacgcccggaatagattcccactccaaatccggatcagcggccgccacgtaccagatcggccacatccgtcttggcccatctccagcccgccagacccagggaggccatcacctcatcgacgccgcgccgggtggtctcatcaaccccgtcaaacagctcgggccacctcgatgatgccgtccgtgaacgatccagattcatgacatgctcctcttcacagatgccgacgacgatcaggccgtggccgtggcaacggggtgacctgccggcgcggctcacgacgttgagccggaaccacacgagacgcaccagtgtgctgcgccgtcttgagtcgggcgctgtactgggccctggcgctgtggtgaacagcccgacgaagcaccgaccgccggctgtcctcatcgccagggcgaggcatggggcgcggcatggtgcgcccggtagcagcatccatgagggtgatccggtcagccaaaatgccgagccggttttcccacttccggggccacggcaccagcaggtcacgctgacagcccacgccgtggcgtcggcagtccacaacattttctcacggccaggatgcgagtgcagcagctccaccggaacaccagcatcacgcacccgccgcatcgtgacctcatcctcacgctgccgatcaccgtcaaccagatggtcagccacgatggtgttcacaccccatgactcatgcagttgcctggccaaggcgcccaacacctgctgacgcacctgtgacttgacgtcatcatcctccagatcctgtgtaccaaccatcacggaggccaacacatcactgcgttgcagaaccagggtgttgacgacgtcgacatcgtcgatacccatgggattgttggcgcgcgcggccacggcatgaaacgtgttggactgcaaattctcgaccagaccacgccgatagtcgttgaactgggaggtgtcggcaatgacaccggtcatgatgtaggccgacccctcggacaaggccctgtaggactcgtcgacgaacgccaccaaccccggccgccgccggtaaagtcgacctgcttcctcgtcagccagcaaccatgacagtttttgccccatatgtcctccttgctgacatgacctcgaacatggtaaactttccgtaggaaaaacggggcaagtactttcgagcggctacctcggcccccggtgggctgtccagccttgtgcggaccgaagccgggggattccttatgtttgcggcaatgatgccgctgcaccccctcatgccgtggtgtggtcctttccccgtgtgcggtgtggtgcgtcgttgactggtttgtggccccgagccttactctgaccggtaggagaacggtgtggggtctacggatagcccactcggctcccggtggaatgtccaacagggtagggttgatgagttggtccatcaggaccgtcccggtggctgcgtcaatgatcgatatttcgatgatgcgcccgtccaggtcggtggtttcggtgtcgaggatgactccgactccgggttctaggagttggggatccaatgggtggtcatcgtgtggctcctacagggagtgtctgggctggacagcggtgcaatacccgcgccatagcggttttttctgcgggggtgacccacagctggtatttcgttttgacggcgatttggcgggccacgtagtcgcatctgtaggccttgttagggggtagccaggtcgctgcatccctgtctcgtttggcctcattagcgggtccgtcgacagccagcaagttcaacgggtcgttggccagggcggtgcgttgcagcggtgagagtttttgcgcgccggtaatccacgcgttcccgagggctacgacgtggtcgatttggactgttgtcgaggtgtgccggccgcgccgccaggcgagtgtggacccggtgtaggggtcgtggagtcgcccggagacgaccacgcatcgtgatccgggtttcaggtgggcctcgaccaggtcgcgggcaagggcatcgttgcgggtgtcgcatccgttgtggccccaggggcgggtcaa

SEQ ID NO: 126 - DNA, 599 bp, Propionibacterium acnes; identical to SEQ ID NO: 100
  source 1..599: mol_type = genomic DNA

SEQ ID NO: 127 - DNA, 3076 bp, Propionibacterium acnes
  source 1..3076: mol_type = genomic DNA
gtgttccagtgcctcgcgggcgtgatgttcttcttcggcaccttcttgccacatgcttcgcgcttcagcctcgccatccaagcgaacctggactgtgaacgagtcctcatcgggtccgtcctcattccacgcggcaatgatcccacgggcctcgtctgcgacctgactcaacttcatcgcctgcccgacagccccgagagccggaatctcgaacacccagatattcgcctcagccgagacctcacgatgggcgatcacttcgtaggtcgtctcaccttctactgtcgtgtccattacttccactccttcggaattttcacgcctgctcgctccagctgtgccaggacaccaactgacgtcagctggtgtcctgctggtatcgatacgcgcccggctccgccggggcgtccccagatttcatggcttcccttggcgttccgcagacgggcccatccttgagaacggagcagcttgaggacgtccttagttttctgcggtttcacacatcatagtatagccccacttaacttgtaaactaagcccctgtttacattttagttggtgcatgtgatccctgctcttatgacgtcgcccgacctggcgccttagacatgcactgttcatcctcaaccacactcaccgtcacgggtccgaaggcgaggtctatcaccattcgcatcgatgaagttgaagcaggatcgtccgcatcacgcactgccgatccggacagacgccaccggccgtaccgactgtttacgatctgccaccgcagactgctgccataaccgctatcacctctgatagtacgtttagtactatcagaggtgattcaagattctcctgtcgagcagccctacagtcacgaagtcctgcgatcgtcatcgcttaaggcagacggatggccatcggggaccactcgcaaagcaggggcgatcagcaacagtgatgtgccatgagcaagtactggtgcaccggctgtttactccgcccctagataaaccacgggtgcaggggtggacaccacaccatgaccgatgtggtgcccaccccatggctcacaggcaggccctatcgccgggagcactgctgcagatgaggctcagtaacctgccatgtctcacctggggccaaggtgccaagctccccacggaatctcaggcatcggaaaccagcagccgaacttccacagcatgagcgccctacgaaaaagcaggccgccgacggttctcaagaactcgccggcggcctgcatcgccactcgaactgtaaccgtggtccgaccccgtgcacaggtaagctccacactcccaccaggcatggccgaggcagtaccaagttgccgtggcccatcggcagatttggttaaattttgaaaagtcatatagactccttctgtaaatttttaaatctcataggactctcgccatcgccagccagcttcgacaggagtcccgatgtttcaccgagtgaaatatcggcaccgtttgagttgacctaaagctcaaaagatgctagaatccatcttacctcgttaggggcgttttgtcaaacgcccctatattgcgtgtcttcgcgcgtcgtagcgctgatgctgcgcctgtgtcgactatccgtttgtaagtactttcgatgacaccagcagtggctactcatgactggtgcgtgcgggtctaaagcagcagggaaaggaatcgcagtagaagccgcttgattcctatcacccctgatggtactatcagtactaacagagcagggcttactcgatgcgtgagaatcggggacatgctgagcctctcgtaggtcattggcctgctgggcgtcagtgtggcgcggttcgatccagtgaactctatcagctctgttagtactgtcagagttgatatattcgaccccaggaggagcccatgagttacatcgttcgcaccggaaatttggtcgacacccccgagctgcgtgagggagagcatggcccgtacacctacgctcgcgtcatcgtgtccgatcgcattcgccaggaggacggcagctacgtcaacgggccagcgatcgcctacgacgtcttggcgggtggcagccaagccgtgaatctggttgaagccgccaaggcgagcggcaacatccgcatcatgttcgcgggccgttaccgcgtcaccgagtggcggggtgagcagggcactcgtatccagcatgaggtccgagccgacgaagtgagcgtgagcctgctcggtcagagggtgaccgtggagcggcctcgaggtgacgtggcatccaaggagagcacgtcgttctgattgagtccgggggcacggtggtcgccgtggtaaaccgtgcccctgacagtactattgacactattggaggtatcagtgtgactgctcaaattttcgccttgtgcaaccagaagggtggcgtcggaaagtcgacatcgacgtttcatctggcccgtgccgcggtgttgcgtggccagcgtgtgcttgtcgtcgacaacgacccccagggcaacctgacgtctgtcgcggccgccgagcccgtgggggaggatcaggcggggctggccgatgtgctcagcgcgcgtgctccagagaccctccgcgatgtgatcgtgccgggaatctggtctggcctcgatgtcgtgccgacgtctggcatcacgctcggctgggtgcgtgacgaactcgtgatcgccggtgccggccgagaaggccggctgcgggaggccctggccggcgtcgaggacgactacgacgtgatcctgatcgactgtgctccatcgctcgatcagctcacgatcaacggcctggtggccgcccagggtgtcatcgtcgtgacgcactcgaagttgtggagcgccaacggcctcgcccagctgctcgacaccatcgacagcgtgcgcagctactacaacggcgcgctgcgcgtggcgggcatcatcgtcaaccagcacgaggagaacaccatcagcgggaaaacctggctcgacgagctgcatcaggctgccgagtcccggaagctgaccgtgcttgacccgccgatccccaagcgtgtcgtcatcgccgataccgtcgaggccgcgcgc

SEQ ID NO: 128 - DNA, 2557 bp, Propionibacterium acnes
  source 1..2557: mol_type = genomic DNA
aaacctctaccaagcatacgctggcaagcccccctctcggccccaccacaacatcaattgctgactcgaacacctttgaggcagcgctttcggcttgcgcaaccccacccacgacaccgtccgcttactactcgaagctgagggattcagaccccacctacaccctcgattgtgaagagcctccaaagcccgatacaacgtctggcgagacaccgtgaacgacctcgccaccgcagcaacgcaccagcagcgcgggatggcttggtattagcccagcgcagggcccccaggcaccagccctaacgaccccgcacccgacgtggctagaggataagccgcacgggaggactccatacccgccgactcattccagcccgccaccagccgagccatatgatcaaccgcccgcggtaaataatccagccactcacgccggtcgtacaaggaaccggccccgctccaggcgtgtgcccaggatcgccacaacacgtcgagctcgaccaccacgcccggaatagattcccactccaaatccggatcagcggccgccacgtaccagatcggccacatccgtcttggcccatctccagcccgccagacccagggaggccatcacctcatcgacgccgcgccgggtggtctcatcaaccccgtcaaacagctcgggccacctcgatgatgccgtccgtgaacgatccagattcatgacatgctcctcttcacagatgccgacgacgatcaggccgtggccgtggcaacggggtgacctgccggcgcggctcacgacgttgagccggaaccacacgagacgcaccagtgtgctgcgccgtcttgagtcgggcgctgtactgggccctggcgctgtggtgaacagcccgacgaagcaccgaccgccggctgtcctcatcgccagggcgaggcatggggcgcggcatggtgcgcccggtagcagcatccatgagggtgatccggtcagccaaaatgccgagccggttttcccacttccggggccacggcaccagcaggtcacgctgacagcccacgccgtggcgtcggcagtccacaacattttctcacggccaggatgcgagtgcagcagctccaccggaacaccagcatcacgcacccgccgcatcgtgacctcatcctcacgctgccgatcaccgtcaaccagatggtcagccacgatggtgttcacaccccatgactcatgcagttgcctggccaaggcgcccaacacctgctgacgcacctgtgacttgacgtcatcatcctccagatcctgtgtaccaaccatcacggaggccaacacatcactgcgttgctgaaccagggtgttgacgacgtcgacatcgtcgatacccatgggattgttggcgcgcgcggccacggcatgaaacgtgttggactgcaaattctcgaccagaccacgccgatagtcgttgaactgggaggtgtcggcaatgacaccggtcatgatgtaggccgacccctcggacaaggccctgtaggactcgtcgacgaacgccaccaaccccggccgccgccggtaaagtcgacctgcttcctcgtcagccagcaaccatgacagtttttgccccatatgtcctccttgctgacatgacctcgaacatggtaaactttccgtaggaaaaacggggcaagtactttcgagcggctacctcggcccccggtgggctgtccagccttgtgcggaccgaagccgggggattccttatgtttgcggcaatgatgccgctgcaccccctcatgccgtggtgtggtcctttccccgtgtgcggtgtggtgcgtcgttgactggtttgtggccccgagccttactctgaccggtaggagaacggtgtggggtctacggatagcccactcggctcccggtggaatgtccaacagggtagggttgatgagttggtccatcaggaccgtcccggtggctgcgtcaatgatcgatatttcgatgatgcgcccgtccaggtcggtggtttcggtgtcgaggatgactccgactccgggttctaggagttggggatccaatgggtggtcatcgtgtggctcctacagggagtgtctgggctggacagcggtgcaatacccgcgccatagcggttttttctgcgggggtgacccacagctggtatttcgttttgacggcgatttggcgggccacgtagtcgcatctgtaggccttgttagggggtagccaggtcgctgcatccctgtctcgtttggcctcattagcgggtccgtcgacagccagcaagttcaacgggtcgttggccagggcggtgcgttgcagcggtgagagtttttgcgcgccggtaatccacgcgttcccgagggctacgacgtggtcgatttggactgttgtcgaggtgtgccggccgcgccgccaggcgagtgtggacccggtgtaggggtcgtggagtcgcccggagacgaccacgcatcgtgatccgggtttcaggtgggcctcgaccaggtcgcgggcaagggcatcgttgcgggtgtcgcatccgttgtggccccaggggcgggtcaa

SEQ ID NO: 129 - DNA, 599 bp, Propionibacterium acnes; identical to SEQ ID NO: 100
  source 1..599: mol_type = genomic DNA

SEQ ID NO: 130 - DNA, 1871 bp, Propionibacterium acnes
  source 1..1871: mol_type = genomic DNA
gccgacggttctcaagaactcgccggcggcctgcatcgccactcgaactgtaaccgtggtccgaccccgtgcacaggtaagctccacactcccaccaggcatggccgaggcagtaccaagttgccgtggcccatcggcagatttggttaaattttgaaaagtcatatagactccttctgtaaatttttaaatctcataggactctcgccatcgccagccagcttcgacaggagtcccgatgtttcaccgagtgaaatatcggcaccgtttgagttgacctaaagctcaaaagatgctagaatccatcttacctcgttaggggcgttttgtcaaacgcccctatattgcgtgtcttcgcgcgtcgtagcgctgatgctgcgcctgtgtcgactatccgtttgtaagtactttcgatgacaccagcagtggctactcatgactggtgcgtgcgggtctaaagcagcagggaaaggaatcgcagtagaagccgcttgattcctatcacccctgatggtactatcagtactaacagagcagggcttactcgatgcgtgagaatcggggacatgctgagcctctcgtaggtcattggcctgctgggcgtcagtgtggcgcggttcgatccagtgaactctatcagctctgttagtactgtcagagttgatatattcgaccccaggaggagcccatgagttacatcgttcgcaccggaaatttggtcgacacccccgagctgcgtgagggagagcatggcccgtacacctacgctcgcgtcatcgtgtccgatcgcattcgccaggaggacggcagctacgtcaacgggccagcgatcgcctacgacgtcttggcgggtggcagccaagccgtgaatctggttgaagccgccaaggcgagcggcaacatccgcatcatgttcgcgggccgttaccgcgtcaccgagtggcggggggagcagggcactcgtatccagcatgaggtccgagccgacgaagtgagcgtgagcctgctcggtcagagggtgaccgtggagcggcctcgaggtgacgtggcatccaaggagagcacgtcgttctgattgagtccgggggcacggtggtcgccgtggtaaaccgtgcccctgacagtactattgacactattggaggtatcagtgtgactgctcaaattttcgccttgtgcaaccagaagggtggcgtcggaaagtcgacatcgacgtttcatctggcccgtgccgcggtgttgcgtggccagcgtgtgcttgtcgtcgacaacgacccccagggcaacctgacgtctgtcgcggccgccgagcccgtgggggaggatcaggcggggctggccgatgtgctcagcgcgcgtgctccagagaccctccgcgatgtgatcgtgccgggaatctggtctggcctcgatgtcgtgccgacgtctggcatcacgctcggctgggtgcgtgacgaactcgtgatcgccggtgccggccgagaaggccggctgcgggaggccctggccggcgtcgaggacgactacgacgtgatcctgatcgactgtgctccatcgctcgatcagctcacgatcaacggcctggtggccgcccagggtgtcatcgtcgtgacgcactcgaagttgtggagcgccaacggcctcgcccagctgctcgacaccatcgacagcgtgcgcagctactacaacggcgcgctgcgcgtggcgggcatcatcgtcaaccagcacgaggagaacaccatcagcgggaaaacctggctcgacgagctgcatcaggctgccgagtcccggaagctgaccgtgcttgacccgccgatccccaagcgtgtcgtcatcgccgataccgtcgaggccgcgcgcggtctcgacga

SEQ ID NO: 131 - DNA, 1729 bp, Propionibacterium acnes
  source 1..1729: mol_type = genomic DNA
cacgcacccgccgcatcgtgacctcatcctcacgtgccaccagcgggggagagcgactaccgctgcagccggtccaaagcgactcttcacagatgagggggtggatcggtagctgacccctaggtcctgatgtgggtcgaggtccttggaatgatggaagttcctacacacccatcgccaaagacctcaacatggacaacgctaccttcaccactccctcatccgtgaagagccagtttatgcacggtgttgaaagaggcgtcggtctacgacgaatgcgggttaatggtcttgcggtgtggggcgctgggcgatggcatcgagaacgcgtgagtgggtggcgatccattcggccgcgtcggggttgatgttgcgggcgacggtgtcgatcgctgttacgtagtgggcaagcctgcgaatctcagcttgttggtcagggtgatcgctgatgagaggctcttgatgggaggcgcggttacggacgtggcggatgagctccacgttttcctcgaagtcgcgtcggctacgccccgggtagtgaggcatacctccgttacgtaagtcagtgagagctttccatacggttgcttccaggcgcggggtgagcagaaagcgccagttgtccagtgacagactcgccacgatctgatcaggggtcgcatcgagcctcgcgcgccgcagtcgcttctcggccctggcgacgttacgcgggaaaccaccgagccgatagctcggggattcccaccaacgccgtatgccagtatcggcgctcaggcgcacgtcaatgaagtttctcaggagtacctcgacatggctgatgtcttccaagaacgctttcgagatgcgggtgttccacacgtaccacgcatcgactggttcgatccggtagcggctgagcctggcgggtgagaaccactcctgcaacgtctcacgactcaccgtgggagcgtggtaggattgatgacgataggcctcgggaaggtcaatgccgcgaaatatcggtatacccccgaggccattgtcttgcccaggcccctcctcgcatacttgcggggcgtcattggctgccgtcatctcgtctcttcccggtacgtggctgtccatgttcacgggcaggtacggcaatgaggttcccgcacacaaacctctaccaagcatacgctggcaagcccccctctcggccccaccacaacatcaattgctgactcgaacacctttgaggcagcgctttcggcttgcgcaaccccacccacgacaccgtccgcttactactcgaagctgagggattcagaccccacctacaccctcgattgtgaagagcctccaaagcccgatacaacgtctggcgagacaccgtgaacgacctcgccaccgcagcaacgcaccagcagcgcgggatggcttggtattagcccagcgcagggcccccaggcaccagccctaacgaccccgcacccgacgtggctagaggataagccgcacgggaggactccatacccgccgactcattccagcccgccaccagccgagccatatgatcaaccgcccgcggtaaataatccagccactcacgccggtcgtacaaggaaccggccccgctccaggcgtgtgcccaggatcgccacaacacgtcgagctcgaccaccacgcccggaatagattcccactccaaatccggatcagcggccgccacgtaccagatcggccacatccgtcttggcccatctcc

SEQ ID NO: 132 - DNA, 1729 bp, Propionibacterium acnes; identical to SEQ ID NO: 131
  source 1..1729: mol_type = genomic DNA

SEQ ID NO: 133 - DNA, 1725 bp, Propionibacterium acnes
  source 1..1725: mol_type = genomic DNA
cgcacccgccgcatcgtgacctcatcctcacgtgccaccagcgggggagagcgactaccgctgcagccggtccaaagcgactcttcacagatgagggggtggatcggtagctgacccctaggtcctgatgtgggtcgaggtccttggaatgatggaagttcctacacacccatcgccaaagacctcaacatggacaacgctaccttcaccactccctcatccgtgaagagccagtttatgcacggtgttgaaagaggcgtcggtctacgacgaatgcgggttaatggtcttgcggtgtggggcgctgggcgatggcatcgagaacgcgtgagtgggtggcgatccattcggccgcgtcggggttgatgttgcgggcgacggtgtcgatcgctgttacgtagtgggcaagcctgcgaatctcagcttgttggtcagggtgatcgctgatgagaggctcttgatgggaggcgcggttacggacgtggcggatgagctccacgttttcctcgaagtcgcgtcggctacgccccgggtagtgaggcatacctccgttacgtaagtcagtgagagctttccatacggttgcttccaggcgcggggtgagcagaaagcgccagttgtccagtgacagactcgccacgatctgatcaggggtcgcatcgagcctcgcgcgccgcagtcgcttctcggccctggcgacgttacgcgggaaaccaccgagccgatagctcggggattcccaccaacgccgtatgccagtatcggcgctcaggcgcacgtcaatgaagtttctcaggagtacctcgacatggctgatgtcttccaagaacgctttcgagatgcgggtgttccacacgtaccacgcatcgactggttcgatccggtagcggctgagcctggcgggtgagaaccactcctgcaacgtctcacgactcaccgtgggagcgtggtaggattgatgacgataggcctcgggaaggtcaatgccgcgaaatatcggtatacccccgaggccattgtcttgcccaggcccctcctcgcatacttgcggggcgtcattggctgccgtcatctcgtctcttcccggtacgtggctgtccatgttcacgggcaggtacggcaatgaggttcccgcacacaaacctctaccaagcatacgctggcaagcccccctctcggccccaccacaacatcaattgctgactcgaacacctttgaggcagcgctttcggcttgcgcaaccccacccacgacaccgtccgcttactactcgaagctgagggattcagaccccacctacaccctcgattgtgaagagcctccaaagcccgatacaacgtctggcgagacaccgtgaacgacctcgccaccgcagcaacgcaccagcagcgcgggatggcttggtattagcccagcgcagggcccccaggcaccagccctaacgaccccgcacccgacgtggctagaggataagccgcacgggaggactccatacccgccgactcattccagcccgccaccagccgagccatatgatcaaccgcccgcggtaaataatccagccactcacgccggtcgtacaaggaaccggccccgctccaggcgtgtgcccaggatcgccacaacacgtcgagctcgaccaccacgcccggaatagattcccactccaaatccggatcagcggccgccacgtaccagatcggccacatccgtcttggcccatct

SEQ ID NO: 134 - DNA, 1719 bp, Propionibacterium acnes
  source 1..1719: mol_type = genomic DNA
cccgccgcatcgtgacctcatcctcacgtgccaccagcgggggagagcgactaccgctgcagccggtccaaagcgactcttcacagatgagggggtggatcggtagctgacccctaggtcctgatgtgggtcgaggtccttggaatgatggaagttcctacacacccatcgccaaagacctcaacatggacaacgctaccttcaccactccctcatccgtgaagagccagtttatgcacggtgttgaaagaggcgtcggtctacgacgaatgcgggttaatggtcttgcggtgtggggcgctgggcgatggcatcgagaacgcgtgagtgggtggcgatccattcggccgcgtcggggttgatgttgcgggcgacggtgtcgatcgctgttacgtagtgggcaagcctgcgaatctcagcttgttggtcagggtgatcgctgatgagaggctcttgatgggaggcgcggttacggacgtggcggatgagctccacgttttcctcgaagtcgcgtcggctacgccccgggtagtgaggcatacctccgttacgtaagtcagtgagagctttccatacggttgcttccaggcgcggggtgagcagaaagcgccagttgtccagtgacagactcgccacgatctgatcaggggtcgcatcgagcctcgcgcgccgcagtcgcttctcggccctggcgacgttacgcgggaaaccaccgagccgatagctcggggattcccaccaacgccgtatgccagtatcggcgctcaggcgcacgtcaatgaagtttctcaggagtacctcgacatggctgatgtcttccaagaacgctttcgagatgcgggtgttccacacgtaccacgcatcgactggttcgatccggtagcggctgagcctggcgggtgagaaccactcctgcaacgtctcacgactcaccgtgggagcgtggtaggattgatgacgataggcctcgggaaggtcaatgccgcgaaatatcggtatacccccgaggccattgttttgcccaggcccctcctcgcatacttgcggggcgtcattggctgccgtcatctcgtctcttcccggtacgtggctgtccatgttcacgggcaggtacggcaatgaggttcccgcacacaaacctctaccaagcatacgctggcaagcccccctctcggccccaccacaacatcaattgctgactcgaacacctttgaggcagcgctttcggcttgcgcaaccccacccacgacaccgtccgcttactactcgaagctgagggattcagaccccacctacaccctcgattgtgaagagcctccaaagcccgatacaacgtctggcgagacaccgtgaacgacctcgccaccgcagcaacgcaccagcagcgcgggatggcttggtattagcccagcgcagggcccccaggcaccagccctaacgaccccgcacccgacgtggctagaggataagccgcacgggaggactccatacccgccgactcattccagcccgccaccagccgagccatatgatcaaccgcccgcggtaaataatccagccactcacgccggtcgtacaaggaaccggccccgctccaggcgtgtgcccaggatcgccacaacacgtcgagctcgaccaccacgcccggaatagattcccactccaaatccggatcagcggccgccacgtaccagatcggccacatccgtcttggcccat

SEQ ID NO: 135 - DNA, 1656 bp, Propionibacterium acnes
  source 1..1656: mol_type = genomic DNA
accagcgggggagagcgactaccgctgcagccggtccaaagcgactcttcacagatgagggggtggatcggtagctgacccctaggtcctgatgtgggtcgaggtccttggaatgatggaagttcctacacacccatcgccaaagacctcaacatggacaacgctaccttcaccactccctcatctgtgaagagccagtttatgcacggtgttgaaagaggcgtcggtctacgacgaatgcgggttaatggtcttgcggtgtggggcgctgggcgatggcatcgagaacgcgtgagtgggtggcgatccattcggccgcgtcggggttgatgttgcgggcgacggtgtcgatcgctgttacgtagtgggcaagcctgcgaatctcagcttgttggtcagggtgagcgctgatgaggggctcttgatgggaggcgcggttacggacgtggcggatgagctccacgttttcctcgaagtcgcgtcggctacgccccgggtagtgaggcatacctccgttacgtaagtcagtgagagctttccatacggttgcttccaggcgcggggtgagcagaaagcgccagttgtccagtgacagactcgccacgatctgatcaggggtcgcatcgagcctcgcgcgccgcagtcgcttctcggccctgtcgacgttacgcgggaaaccaccgagccgatagctcggggattcccaccaacgccgtatgccagtatcggcgctcaggcgcacgtcaatgaagtttctcaggagtacctcgacatggctgatgtcttccaagaacgctttcgagatgcgggtgttccacacgtaccacgcatcgactggttcgatccggtagcggctgagcctggcgggtgagaaccactcctgcaacgtctcacgactcaccgtgggagcgtggtaggattgatgacgataggcctcgggaaggtcaatgccgcgaaatatcggtatacccccgaggccattgttttgcccaggcccctcctcgcatacttgcggggcgtcattggctgccgtcatctcgtctcttcccggtacgtggctgtccatgttcacgggcaggtacggcaatgaggttcccgcacacaaacctctaccaagcatacgctggcaagcccccctctcggccccaccacaacatcaattgctgactcgaacacctttgaggcagcgctttcggcttgcgcaaccccatccacgacaccgtccgcttactactcgaagctgagggattcagaccccacctacaccctcgattgtgaagagcctccaaagcccgatacaacgtctggcgagacaccgtgaacgacctcgccaccgcagcaacgcaccagcagcgcgggatggcttggtattagcccagcgcagggccccaggcaccagccctaacgaccccgcacccgacgtggctagaggataagccgcacgggaggactccatacccgccgactcattccagcccgccaccagccgagccatatgatcaaccgcccgcggtaaataatccagccactcacgccggtcgtataaggaaccggccccgctccaggcgtgtgcccaggatcgccacaacacgtcgagctcgaccaccacgcccggaatagattcccactccaaatccggatcagcggccgccacgt

SEQ ID NO: 136 - DNA, 1438 bp, Propionibacterium acnes
  source 1..1438: mol_type = genomic DNA
cacgcacccgccgcatcgtgacctcatcctcacgctgccgatcaccgtcaaccagatggtcagccacgatggtgttcacaccccatgactcatgcagttgcctggccaaggcgcccaacacctgctgacgcacctgtgacttgacgtcatcatcctccagatcctgtgtaccaaccatcacggaggccaacacatcactgcgttgctgaaccagggtgttgacgacgtcgacatcgtcgatacccatgggattgttggcgcgcgcggccacggcatgaaacgtgttggactgcaaattctcgaccagaccacgccgatagtcgttgaactgggaggtgtcggcaatgacaccggtcatgatgtaggccgacccctcggacaaggccctgtaggactcgtcgacgaacgccaccaaccccggccgccgccggtaaagtcgacctgcttcctcgtcagccagcaaccatgacagtttttgccccatatgtcctccttgctgacatgacctcgaacatggtaaactttccgtaggaaaaacggggcaagtactttcgagcggctacctcggcccccggtgggctgtccagccttgtgcggaccgaagccgggggattccttatgtttgcggcaatgatgccgctgcaccccctcatgccgtggtgtggtcctttccccgtgtgcggtgtggtgcgtcgttgactggtttgtggccccgagccttactctgaccggtaggagaacggtgtggggtctacggatagcccactcggctcccggtggaatgtccaacagggtagggttgatgagttggtccatcaggaccgtcccggtggctgcgtcaatgatcgatatttcgatgatgcgcccgtccaggtcggtggtttcggtgtcgaggatgactccgactccgggttctaggagttggggatccaatgggtggtcatcgtgtggctcctacagggagtgtctgggctggacagcggtgcaatacccgcgccatagcggttttttctgcgggggtgacccacagctggtatttcgttttgacggcgatttggcgggccacgtagtcgcatctgtaggccttgttagggggtagccaggtcgctgcatccctgtctcgtttggcctcattagcgggtccgtcgacagccagcaagttcaacgggtcgttggccagggcggtgcgttgcagcggtgagagtttttgcgcgccggtaatccacgcgttcccgagggctacgacgtggtcgatttggactgttgtcgaggtgtgccggccgcgccgccaggcgagtgtggacccggtgtaggggtcgtggagtcgcccggagacgaccacgcatcgtgatccgggtttcaggtgggcctcgaccaggtcgcgggcaagggcatcgttgcgggtgtcgcatccgttgtggccccaggggcgggtcaa

SEQ ID NO: 137 - DNA, 1436 bp, Propionibacterium acnes
  source 1..1436: mol_type = genomic DNA
cgcacccgccgcatcgtgacctcatcctcacgctgccgatcaccgtcaaccagatggtcagccacgatggtgttcacaccccatgactcatgcagttgcctggccaaggcgcccaacacctgctgacgcacctgtgacttgacgtcatcatcctccagatcctgtgtaccaaccatcacggaggccaacacatcactgcgttgctgaaccagggtgttgacgacgtcgacatcgtcgatacccatgggattgttggcgcgcgcggccacggcatgaaacgtgttggactgcaaattctcgaccagaccacgccgatagtcgttgaactgggaggtgtcggcaatgacaccggtcatgatgtaggccgacccctcggacaaggccctgtaggactcgtcgacgaacgccaccaaccccggccgccgccggtaaagtcgacctgcttcctcgtcagccagcaaccatgacagtttttgccccatatgtcctccttgctgacatgacctcgaacatggtaaactttccgtaggaaaaacggggcaagtactttcgagcggctacctcggcccccggtgggctgtccagccttgtgcggaccgaagccgggggattccttatgtttgcggcaatgatgccgctgcaccccctcatgccgtggtgtggtcctttccccgtgtgcggtgtggtgcgtcgttgactggtttgtggccccgagccttactctgaccggtaggagaacggtgtggggtctacggatagcccactcggctcccggtggaatgtccaacagggtagggttgatgagttggtccatcaggaccgtcccggtggctgcgtcaatgatcgatatttcgatgatgcgcccgtccaggtcggtggtttcggtgtcgaggatgactccgactccgggttctaggagttggggatccaatgggtggtcatcgtgtggctcctacagggagtgtctgggctggacagcggtgcaatacccgcgccatagcggttttttctgcgggggtgacccacagctggtatttcgttttgacggcgatttggcgggccacgtagtcgcatctgtaggccttgttagggggtagccaggtcgctgcatccctgtctcgtttggcctcattagcgggtccgtcgacagccagcaagttcaacgggtcgttggccagggcggtgcgttgcagcggtgagagtttttgcgcgccggtaatccacgcgttcccgagggctacgacgtggtcgatttggactgttgtcgaggtgtgccggccgcgccgccaggcgagtgtggacccggtgtaggggtcgtggagtcgcccggagacgaccacgcatcgtgatccgggtttcaggtgggcctcgaccaggtcgcgggcaagggcatcgttgcgggtgtcgcatccgttgtggccccaggggcgggtcaa

SEQ ID NO: 138 - DNA, 1436 bp, Propionibacterium acnes; identical to SEQ ID NO: 137
  source 1..1436: mol_type = genomic DNA

SEQ ID NO: 139 - DNA, 1432 bp, Propionibacterium acnes
  source 1..1432: mol_type = genomic DNA
cccgccgcatcgtgacctcatcctcacgctgccgatcaccgtcaaccagatggtcagccacgatggtgttcacaccccatgactcatgcagttgcctggccaaggcgcccaacacctgctgacgcacctgtgacttgacgtcatcatcctccagatcctgtgtaccaaccatcacggaggccaacacatcactgcgttgctgaaccagggtgttgacgacgtcgacatcgtcgatacccatgggattgttggcgcgcgcggccacggcatgaaacgtgttggactgcaaattctcgaccagaccacgccgatagtcgttgaactgggaggtgtcggcaatgacaccggtcatgatgtaggccgacccctcggacaaggccctgtaggactcgtcgacgaacgccaccaaccccggccgccgccggtaaagtcgacctgcttcctcgtcagccagcaaccatgacagtttttgccccatatgtcctccttgctgacatgacctcgaacatggtaaactttccgtaggaaaaacggggcaagtactttcgagcggctacctcggcccccggtgggctgtccagccttgtgcggaccgaagccgggggattccttatgtttgcggcaatgatgccgctgcaccccctcatgccgtggtgtggtcctttccccgtgtgcggtgtggtgcgtcgttgactggtttgtggccccgagccttactctgaccggtaggagaacggtgtggggtctacggatagcccactcggctcccggtggaatgtccaacagggtagggttgatgagttggtccatcaggaccgtcccggtggctgcgtcaatgatcgatatttcgatgatgcgcccgtccaggtcggtggtttcggtgtcgaggatgactccgactccgggttctaggagttggggatccaatgggtggtcatcgtgtggctcctacagggagtgtctgggctggacagcggtgcaatacccgcgccatagcggttttttctgcgggggtgacccacagctggtatttcgttttgacggcgatttggcgggccacgtagtcgcatctgtaggccttgttagggggtagccaggtcgctgcatccctgtctcgtttggcctcattagcgggtccgtcgacagccagcaagttcaacgggtcgttggccagggcggtgcgttgcagcggtgagagtttttgcgcgccggtaatccacgcgttcccgagggctacgacgtggtcgatttggactgttgtcgaggtgtgccggccgcgccgccaggcgagtgtggacccggtgtaggggtcgtggagtcgcccggagacgaccacgcatcgtgatccgggtttcaggtgggcctcgaccaggtcgcgggcaagggcatcgttgcgggtgtcgcatccgttgtggccccaggggcgggtcaa

SEQ ID NO: 140 - DNA, 1432 bp, Propionibacterium acnes
  source 1..1432: mol_type = genomic DNA
cccgccgcatcgtgacctcatcctcacgctgccgatcaccgtcaaccagatggtcagccacgatggtgttcacaccccatgactcatgcagttgcctggccaaggcgcccaacacctgctgacgcacctgtgacttgacgtcatcatcctccagatcctgtgtaccaaccatcacggaggccaacacatcactgcgttgctgaaccagggtgttgacgacgtcgacatcgtcgatatccatgggattgttggcgcgcgcggccacggcatgaaacgtgttggactgcaaattctcgaccagaccacgccgatagtcgttgaactgggaggtgtcggcaatgacaccggtcatgatgtaggccgacccctcggacaaggccctgtaggactcgtcgacgaacgccaccaaccccggccgccgccggtaaagtcgacctgcttcctcgtcagccagcaaccatgacagtttttgccccatatgtcctccttgctgacatgacctcgaacatggtaaactttccgtaggaaaaacggggcaagtactttcgagcggctacctcggcccccggtgggctgtccagccttgtgcggaccgaagccgggggattccttatgtttgcggcaatgatgccgctgcaccccctcatgccgtggtgtggtcctttccccgtgtgcggtgtggtgcgtcgttgactggtttgtggccccgagccttactctgaccggtaggagaacggtgtggggtctacggatagcccactcggctcccggtggaatgtccaacagggtagggttgatgagttggtccatcaggaccgtcccggtggctgcgtcaatgatcgatatttcgatgatgcgcccgtccaggtcggtggtttcggtgtcgaggatgactccgactccgggttctaggagttggggatccaatgggtggtcatcgtgtggctcctacagggagtgtctgggctggacagcggtgcaatacccgcgccatagcggttttttctgcgggggtgacccacagctggtatttcgttttgacggcgatttggcgggccacgtagtcgcatctgtaggccttgttagggggtagccaggtcgctgcatccctgtctcgtttggcctcattagcgggtccgtcgacagccagcaagttcaacgggtcgttggccagggcggtgcgttgcagcggtgagagtttttgcgcgccggtaatccacgcgttcccgagggctacgacgtggtcgatttggactgttgtcgaggtgtgccggccgcgccgccaggcgagtgtggacccggtgtaggggtcgtggagtcgcccggagacgaccacgcatcgtgatccgggtttcgggtgggcctcgaccaggtcgcgggcaagggcatcgttgcgggtgtcgcatccgttgtggccccaggggcgggtcaa

SEQ ID NO: 141 - DNA, 1438 bp, Propionibacterium acnes
  source 1..1438: mol_type = genomic DNA
cacgcacccgccgcatcgtgacctcatcctcacgctgccgatcaccgtcaaccagatggtcagccacgatggtgttcacaccccatgactcatgcagttgcctggccaaggcgcccaacacctgctgacgcacctgtgacttgacgtcatcatcctccagatcctgtgtaccaaccatcacggaggccaacacatcactgcgttgctgaaccagggtgttgacgacgtcgacatcgtcgatacccatgggattgttggcgcgcgcggccacggcatgaaacgtgttggactgcaaattctcgaccagaccacgccgatagtcgttgaactgggaggtgtcggcaatgacaccggtcatgatgtaggccgacccctcggacaaggccctgtaggactcgtcgacgaacgccaccaaccccggccgccgccggtaaagtcgacctgcttcctcgtcagccagcaaccatgacagtttttgccccatatgtcctccttgctgacatgacctcgaacatggtaaactttccgtaggaaaaacggggcaagtactttcgagcggctacctcggcccccggtgggctgtccagccttgtgcggaccgaagccgggggattccttatgtttgcggcaatgatgccgcttcattttttcttgccgtggtgtggtcctttccccgtgtgcggtgtggtgcgtcgttgactggtttgtggccccgagccttactctgaccggtaggagaacggtgtggggtctacggatagcccactcggctcccggtggaatgtccaacagggtagggttgatgagttggtccatcaggaccgtcccggtggctgcgtcaatgatcgatatttcgatgatgcgcccgtccaggtcggtggtttcggtgtcgaggatgactccgactccgggttctaggagttggggatccaatgggtggtcatcgtgtggctcctacagggagtgtctgggctggacagcggtgcaatacccgcgccatagcggttttttctgcgggggtgacccacagctggtatttcgttttgacggcgatttggcgggccacgtagtcgcatctgtaggccttgttagggggtagccaggtcgctgcatccctgtctcgtttggcctcattagcgggtccgtcgacagccagcaagttcaacgggtcgttggccagggcggtgcgttgcagcggtgagagtttttgcgcgccggtaatccacgcgttcccgagggctacgacgtggtcgatttggactgttgtcgaggtgtgccggccgcgccgccaggcgagtgtggacccggtgtaggggtcgtggagtcgcccggagacgaccacgcatcgtgatccgggtttcaggtgggcctcgaccaggtcgcgggcaagggcatcgttgcgggtgtcgcatccgttgtggccccaggggcgggtcaa

SEQ ID NO: 142 - DNA, 1399 bp, Propionibacterium acnes
  source 1..1399: mol_type = genomic DNA
gatcaccgtcaaccagatggtcagccacgatggtgttcacaccccatgactcatgcagttgcctggccaaggcgcccaacacctgctgacgcacctgtgacttgacgtcatcatcctccagatcctgtgtaccaaccatcacggaggccaacacatcactgcgttgctgaaccagggtgttgacgacgtcgacatcgtcgatacccatgggattgttggcgcgcgcggccacggcatgaaacgtgttggactgcaaattctcgaccagaccacgccgatagtcgttgaactgggaggtgtcggcaatgacaccggtcatgatgtaggccgacccctcggacaaggccctgtaggactcgtcgacgaacgccaccaaccccggccgccgccggtaaagtcgacctgcttcctcgtcagccagcaaccatgacagtttttgccccatatgtcctccttgctgacatgacctcgaacatggtaaactttccgtaggaaaaacggggcaagtactttcgagcggctacctcggcccccggtggaatgtccagccttgtgcggaccgaagccgggggattccttatgtttgcggcaatgatgccgctgcaccccctcatgccgtggtgtggtcctttccccgtgtgcggtgtggtgcgtcgttgactggtttgtggccccgagccttactctgaccggtaggagaacggtgtggggtctacggatagcccactcggctcccggtggaatgtccaacagggtagggttgatgagttggtccatcaggaccgtcccggtggctgcgtcaatgatcgatatttcgatgatgcgcccgtccaggtcggtggtttcggtgtcgaggatgactccgactccgggttctaggagttggggatccaatgggtggtcatcgtgtggctcctacagggagtgtctgggctggacagcggtgcaatacccgcgccatagcggttttttctgcgggggtgacccacagctggtatttcgttttgacggcgatttggcgggccacgtagtcgcatctgtaggccttgttagggggtagccaggtcgctgcatccctgtctcgtttggcctcattagcgggtccgtcgacagccagcaagttcaacgggtcgttggccagggcggtgcgttgcagcggtgagagtttttgcgcgccggtaatccacgcgttcccgagggctacgacgtggtcgatttggactgttgtcgaggtgtgccggccgcgccgccaggcgagtgtggacccggtgtaggggtcgtggagtcgcccggagacgaccacgcatcgtgatccgggtttcaggtgggcctcgaccaggtcgcgggcaagggcatcgttgcgggtgtcgcatccgttgtggccccaggggcgggtcaa

SEQ ID NO: 143 - DNA, 1155 bp, Propionibacterium acnes
  source 1..1155: mol_type = genomic DNA
acaaacctctaccaagcatacgctggcaagcccccctctcggccccaccacaacatcaattgctgactcgaacacctttgaggcagcgctttcggcttgcgcaaccccacccacgacaccgtccgcttactactcgaagctgagggattcagaccccacctacaccctcgattgtgaagagcctccaaagcccgatacaacgtctggcgagacaccgtgaacgacctcgccaccgcagcaacgcaccagcagcgcgggatggcttggtattagcccagcgcagggcccccaggcaccagccctaacgaccccgcacccgacgtggctagaggataagccgcacgggaggactccatacccgccgactcattccagcccgccaccagccgagccatatgatcaaccgcccgcggtaaataatccagccactcacgccggtcgtacaaggaaccggccccgctccaggcgtgtgcccaggatcgccacaacacgtcgagctcgaccaccacgcccggaatagattcccactccaaatccggatcagcggccgccacgtaccagatcggccacatccgtcttggcccatctccagcccgccagacccagggaggccatcacctcatcgacgccgcgccgggtggtctcatcaaccccgtcaaacagctcgggccacctcgatgatgccgtccgtgaacgatccagattcatgacatgctcctcttcacagatgccgacgacgatcaggccgtggccgtggcaacggggtgacctgccggcgcggctcacgacgttgagccggaaccacacgagacgcaccagtgtgctgcgccgtcttgagtcgggcgctgtactgggccctggcgctgtggtgaacagcccgacgaagcaccgaccgccggctgtcctcatcgccagggcgaggcatggggcgcggcatggtgcgcccggtagcagcatccatgagggtgatccggtcagccaaaatgccgagccggttttcccacttccggggccacggcaccagcaggtcacgctgacagcccacgccgtggcgtcggcagtccacaacattttctcacggccaggatgcgagtgcagcagctccaccggaacaccagcatcacgcacccgccgcatcgtgacctcatcctcacg

SEQ ID NO: 144 - DNA, 715 bp, Propionibacterium acnes
  source 1..715: mol_type = genomic DNA
accagatcggccacatccgtcttggcccatctccagcccgccagacccagggaggccatcacctcatcgacgccgcgccgggtggtctcatcaaccccgtcaaacagctcgggccacctcgatgatgccgtccgtgaacgatccagattcatgacatgctcctcttcacagatgccgacgacgatcaggccgtggccgtggcaacggggtgacctgccggcgcggctcacgacgttgagccggaaccacacgagacgcaccagtgtgctgcgccgtcttgagtcgggcgctgtactgggccctggcgctgtggtgaacagcccgacgaagcaccgaccgccggctgtcctcatcgccagggcgaggcatggggcgcggcatggtgcgcccggtagcagcatccatgagggtgatccggtcagccaaaatgccgagccggttttcccacttccggggccacggcaccagcaggtcacgctgacagcccacgccgtggcgtcggcagtccacaacattttctcacggccaggatgcgagtgcagcagctccaccggaacaccagcatcacgcacccgccgcatcgtgacctcatcctcacgtgccaccagcgggggagagcgactaccgctgcagccggtccaaagcgactcttcacagatgagggggtggatcggtagctgacccctaggtcctgatgtgggtcgaggtccttgga

SEQ ID NO: 145 - DNA, 1134 bp, Propionibacterium acnes
  source 1..1134: mol_type = genomic DNA
gtgttccagtgcctcgcgggcgtgatgttcttcttcggcaccttcttgccacatgcttcgcgcttcagcctcgccatccaagcgaacctggactgtgaacgagtcctcatcgggtccgtcctcattccacgcggcaatgatcccacgggcctcgtctgcgacctgactcaacttcatcgcctgcccgacagccccgagagccggaatctcgaacacccagatattcgcctcagccgagacctcacgatgggcgatcacttcgtaggtcgtctcaccttctactgtcgtgtccattacttccactccttcggaattttcacgcctgctcgctccagctgtgccaggacaccaactgacgtcagctggtgtcctgctggtatcgatacgcgcccggctccgccggggcgtccccagatttcatggcttcccttggcgttccgcagacgggcccatccttgagaacggagcagcttgaggacgtccttagttttctgcggtttcacacatcatagtatagccccacttaacttgtaaactaagcccctgtttacattttagttggtgcatgtgatccctgctcttatgacgtcgcccgacctggcgccttagacatgcactgttcatcctcaaccacactcaccgtcacgggtccgaaggcgaggtctatcaccattcgcatcgatgaagttgaagcaggatcgtccgcatcacgcactgccgatccggacagacgccaccggccgtaccgactgtttacgatctgccaccgcagactgctgccataaccgctatcacctctgatagtacgtttagtactatcagaggtgattcaagattctcctgtcgagcagccctacagtcacgaagtcctgcgatcgtcatcgcttaaggcagacggatggccatcggggaccactcgcaaagcaggggcgatcagcaacagtgatgtgccatgagcaagtactggtgcaccggctgtttactccgcccctagataaaccacgggtgcaggggtggacaccacaccatgaccgatgtggtgcccaccccatggctcacaggcaggccctatcgccgggagcactgctgcagatgaggctcagtaacctgccatgtctcacctggggccaaggt

SEQ ID NO: 146 - DNA, 1057 bp, Propionibacterium acnes
  source 1..1057: mol_type = genomic DNA
cccctaggtcctgatgtgggtcgaggtccttggaatgatggaagttcctacacacccatcgccaaagacctcaacatggacaacgctaccttcaccactccctcatctgtgaagagccagtttatgcacggtgttgaaagaggcgtcggtctacgacgaatgcgggttaatggtcttgcggtgtggggcgctgggcgatggcatcgagaacgcgtgagtgggtggcgatccattcggccgcgtcggggttgatgttgcgggcgacggtgtcgatcgctgttacgtagtgggcaagcctgcgaatctcagcttgttggtcagggtgatcgctgatgagaggctcttgatgggaggcgcggttacggacgtggcggatgagctccacgttttcctcgaagtcgcgtcggctacgccccgggtagtgaggcatacctccgttacgtaagtcagtgagagctttccatacggttgcttccaggcgcggggtgagcagaaagcgccagttgtccagtgacagactcgccacgatctgatcaggggtcgcatcgagcctcgcgcgccgcagtcgcttctcggccctggcgacgttacgcgggaaaccaccgagccgatagctcggggattcccaccaacgccgtatgccagtatcggcgctcaggcgcacgtcaatgaagtttctcaggagtacctcgacatggctgatgtcttccaagaacgctttcgagatgcgggtgttccacacgtaccacgcatcgactggttcgatccggtagcggctgagcctggcgggtgagaaccactcctgcaacgtctcacgactcaccgtgggagcgtggtaggattgatgacgataggcctcgggaaggtcaatgccgcgaaatatcggtatacccccgaggtcattgttttgcccaggcccctcctcgcatacttgcggggcgtcattggctgccgtcatctcgtctcttcccggtacgtggctgtccatgttcacgggcaggtacggcaatgaggttcccgcacacaaacctctaccaagcatacgctggcaagcccc

SEQ ID NO: 147 - DNA, 1057 bp, Propionibacterium acnes; identical to SEQ ID NO: 146
  source 1..1057: mol_type = genomic DNA

SEQ ID NO: 148 - DNA, 1057 bp, Propionibacterium acnes; identical to SEQ ID NO: 146
  source 1..1057: mol_type = genomic DNA

SEQ ID NO: 149 - DNA, 1055 bp, Propionibacterium acnes
  source 1..1055: mol_type = genomic DNA
cccctaggtcctgatgtgggtcgaggtccttggaatgatggaagttcctacacacccatcgccaaagacctcaacatggacaacgctaccttcaccactccctcatctgtgaagagccagtttatgcacggtgttgaaagaggcgtcggtctacgacgaatgcgggttaatggtcttgcggtgtggggcgctgggcgatggcatcgagaacgcgtgagtgggtggcgatccattcggccgcgtcggggttgatgttgcgggcgacggtgtcgatcgctgttacgtagtgggcaagcctgcgaatctcagcttgttggtcagggtgatcgctgatgaggggctcttgatgggaggcgcggttacggacgtggcggatgagctccacgttttcctcgaagtcgcgtcggctacgccccgggtagtgaggcatacctccgttacgtaagtcagtgagagctttccatacggttgcttccaggcgcggggtgagcagaaagcgccagttgtccagtgacagactcgccacgatctgatcaggggtcgcatcgagccccgcgcgccgcagtcgcttctcggccctggcgacgttacgcgggaaaccaccgagccgatagctcggggattcccaccaacgccgtatgccagtatcggcgctcaggcgcacgtcaatgaagtttctcaggagtacctcgacatggctgatgtcttccaagaacgctttcgagatgcgggtgttccacacgtaccacgcatcgactggttcgatccggtagcggctgagcctggcgggtgagaaccactcctgcaacgtctcacgactcaccgtgggagcgtggtaggattgatgacgataggcctcgggaaggtcaatgccgcgaaatatcggtatacccccgaggtcattgtcttgcccaggcccctcctcgcatacttgcggggcgtcattggctgccgtcatctcgtctcttcccggtacgtggctgtccatgttcacgggcaggtacggcaatgaggttcccgcacacaaacctctaccaagcatacgctggcaagcc

SEQ ID NO: 150 - DNA, 1055 bp, Propionibacterium acnes; identical to SEQ ID NO: 149
  source 1..1055: mol_type = genomic DNA

SEQ ID NO: 151 - DNA, 1055 bp, Propionibacterium acnes
  source 1..1055: mol_type = genomic DNA
cccctaggtcctgatgtgggtcgaggtccttggaatgatggaagttcctacacacccatcgccaaagacctcaacatggacaacgctaccttcaccactccctcatctgtgaagagccagtttatgcacggtgttgaaagaggcgtcggtctacgacgaatgcgggttaatggtcttgcggtgtggggcgctgggcgatggcatcgagaacgcgtgagtgggtggcgatccattcggccgcgtcggggttgatgttgcgggcgacggtgtcgatcgctgttacgtagtgggcaagcctgcgaatctcagcttgttggtcagggtgagcgctgatgaggggctcttgatgggaggcgcggttacggacgtggcggatgagctccacgttttcctcgaagtcgcgtcggctacgccccgggtagtgaggcatacctccgttacgtaagtcagtgagagctttccatacggttgcttccaggcgcggggtgagcagaaagcgccagttgtccagtgacagactcgccacgatctgatcaggggtcgcatcgagcctcgcgcgccgcagtcgcttctcggccctgtcgacgttacgcgggaaaccaccgagccgatagctcggggattcccaccaacgccgtatgccagtatcggcgctcaggcgcacgtcaatgaagtttctcaggagtacctcgacatggctgatgtcttccaagaacgctttcgagatgcgggtgttccacacgtaccacgcatcgactggttcgatccggtagcggctgagcctggcgggtgagaaccactcctgcaacgtctcacgactcaccgtgggagcgtggtaggattgatgacgataggcctcgggaaggtcaatgccgcgaaatatcggtatacccccgaggccattgttttgcccaggcccctcctcgcatacttgcggggcgtcattggctgccgtcatctcgtctcttcccggtacgtggctgtccatgttcacgggcaggtacggcaatgaggttcccgcacacaaacctctaccaagcatacgctggcaagcc

SEQ ID NO: 152 - DNA, 1055 bp, Propionibacterium acnes
  source 1..1055: mol_type = genomic DNA
cccctaggtcctgatgtgggtcgaggtccttggaatgatggaagttcctacacacccatcgccaaagacctcaacatggacaacgctaccttcaccactccctcatccgtgaagagccagtttatgcacggtgttgaaagaggcgtcggtctacgacgaatgcgggttaatggtcttgcggtgtggggcgctgggcgatggcatcgagaacgcgtgagtgggtggcgatccattcggccgcgtcggggttgatgttgcgggcgacggtgtcgatcgctgttacgtagtgggcaagcctgcgaatctcagcttgttggtcagggtgagcgctgatgaggggctcttgatgggaggcgcggttacggacgtggcggatgagctccacgttttcctcgaagtcgcgtcggctacgccccgggtagtgaggcatacctccgttacgtaagtcagtgagagctttccatacggttgcttccaggcgcggggtgagcagaaagcgccagttgtccagtgacagactcgccacgatctgatcaggggtcgcatcgagcctcgcgcgccgcagtcgcttctcggccctgtcgacgttacgcgggaaaccaccgagccgatagctcggggattcccaccaacgccgtatgccagtatcggcgctcaggcgcacgtcaatgaagtttctcaggagtacctcgacatggctgatgtcttccaagaacgctttcgagatgcgggtgttccacacgtaccacgcatcgactggttcgatccggtagcggctgagcctggcgggtgagaaccactcctgcaacgtctcacgactcaccgtgggagcgtggtaagattgatgacgataggcctcgggaaggtcaatgccgcgaaatatcggtatacccccgaggtcattgtcttgcccaggcccctcctcgcatacttgcggggcgtcattggctgccgtcatctcgtctcttcccggtacgtggctgtccatgttcacgggcaggtacggcaatgaggttcccgcacacaaacctctaccaagcatacgctggcaagcc

SEQ ID NO: 153 - DNA, 1057 bp, Propionibacterium acnes
  source 1..1057: mol_type = genomic DNA
cccctaggtcctgatgtgggtcgaggtccttggaatgatggaagttcctacacacccatcgccaaagacctcaacatggacaacgctaccttcaccactccctcatctgtgaagagccagtttatgcacggtgttgaaagaggcgtcggtctacgacgaatgcgggttaatggtcttgtggtgtggggcgctgggcgatggcatcgagaacgcgtgagtgggtggcgatccattcggccgcgtcggggttgatgttgcgggcgacggtgtcgatcgctgttacgtagtgggcaagcctgcgaatctcagcttgttggtcagggtgatcgctgatgaggggctcttgatgggaggcgcggttacggacgtggcggatgagctccacgttttcctcgaagtcgcgtcggctacgccccgggtagtgaggcatacctccgttacgtaagtcagtgagagctttccatacggttgcttccaggcgcggggtgagcagaaagcgccagttgtccagtgacagactcgccacgatctgatcaggggtcgcatcgagcctcgcgcgccgcagtcgcttctcggccctggcgacgttacgcgggaaaccaccgagccgatagctcggggattcccagcaacgccgtatgccagtatcggcgctcaggcgcacgtcaatgaagtttctcaggagtacctcgacatggctgatgtcttccaagaacgctttcgagatgcgggtgttccacacgtaccacgcatcgactggttcgatccggtagcggctgagcctggcgggtgagaaccactcctgcaacgtctcacgactcaccgtgggagcgtggtaggattgatgacgataggcctcgggaaggtcaatgccgcgaaatatcggtatacccccgaggtcattgttttgcccaggcccctcctcgcatacttgcggggcgtcattggctgccgtcatctcgtctcttcccggtacgtggctgtccatgttcacgggcaggtacggcaatgaggttcccgcacacaaacctctaccaagcatacgctggcaagcccc

SEQ ID NO: 154 - DNA, 1055 bp, Propionibacterium acnes
  source 1..1055: mol_type = genomic DNA
cccctaggtcctgatgtgggtcgaggtccttggaatgatggaagttcctacacacccatcgccaaagacctcaacatggacaacgctaccttcaccactccctcatctgtgaagagccagtttatgcacggtgttgaaagaggcgtcggtctacgacgaatgcgggttaatggtcttgtggtgtggggcgctgggcgatggcatcgagaacgcgtgagtgggtggcgatccattcggccgcgtcggggttgatgttgcgggcgacggtgtcgatcgctgttacgtagtgggcaagcctgcgaatctcagcttgttggtcagggtgagcgctgatgagaggctcttgatgggaggcgcggttacggacgtggcggatgagctccacgttttcctcgaagtcgcgtcggctacgccccgggtagtgaggcatacctccgttacgtaagtcagtgagagctttccatacggttgcttccaggcgcggggtgagcagaaagcgccagttgtccagtgacagactcgccacgatctgatcaggggtcgcatcgagcctcgcgcgccgcagtcgcttctcggccctgtcgacgttacgcgggaaaccaccgagccgatagctcggggattcccaccaacgccgtatgccagtatcggcgctcaggcgcacgtcaatgaagtttctcaggagtacctcgacatggctgatgtcttccaagaacgctttcgagatgcgggtgttccacacgtaccacgcatcgactggttcgatccggtagcggctgagcctggcgggtgagaaccactcctgcaacgtctcacgactcaccgtgggagcgtggtaagattgatgacgataggcctcgggaaggtcaatgccgcgaaatatcggtatacccccgaggtcattgtcttgcccaggcccctcctcgcatacttgcggggcgtcattggctgccgtcatctcgtctcttcccggtacgtggctgtccatgttcacgggcaggtacggcaatgaggttcccgcacacaaacctctaccaagcatacgctggcaagcc

SEQ ID NO: 155 - DNA, 1057 bp, Propionibacterium acnes
  source 1..1057: mol_type = genomic DNA
cccctaggtcctgatgtgggtcgaggtccttggaatgatggaagttcctacacacccatcgccaaagacctcaacatggacaacgctaccttcaccactccctcatctgtgaagagccagtttatgcacggtgttgaaagaggcgtcggtctacgacgaatgcgggttaatggtcttgcggtgtggggcgctgggcgatggcatcgagaacgcgtgagtgggtggcgatccattcggccgcgtcggggttgatgttgcgggcgacggtgtcgatcgctgttacgtagtgggcaagcctgcgaatctcagcttgttggtcagggtgagcgctgatgaggggctcttgatgggaggcgcggttacggacgtggcggatgagctccacgttttcctcgaagtcgcgtcggctacgccccgggtagtgaggcatacctccgttacgtaagtcagtgagagctttccatacggttgcttccaggcgcggggtgagcagaaagcgccagttgtccagtgacagactcgccacgatctgatcaggggtcgcatcgagcctcgcgcgccgcagtcgcttctcggccctgtcgacgttacgcgggaaaccaccgagccgatagctcggggattcccaccaacgccgtatgccagtatcggcgctcaggcgcacgtcaatgaagtttctcaggagtacctcgacatggctgatgtcttccaagaacgctttcgagatgcgggtgttccacacgtaccacgcatcgactggttcgatccggtagcggctgagcctggcgggtgagaaccactcctgcaacgtctcacgactcaccgtgggagcgtggtaggattgatgacgataggcctcgggaaggtcaatgccgcgaaatatcggtatacccccgaggtcattgttttgcccaggcccctcctcgcatacttgcggggcgtcattggctggcgtcatctcgtctcttcccggtacgtggctgtccatgttcacgggcaggtacggcaatgaggttcccgcacacaaacctctaccaagcatacgctggcaagcccc

SEQ ID NO: 156 - DNA, 1055 bp, Propionibacterium acnes
  source 1..1055: mol_type = genomic DNA
cccctaggtcctgatgtgggtcgaggtccttggaatgatggaagttcctacacacccatcgccaaagacctcaacatggacaacgctaccttcaccactccctcatctgtgaagagccagtttatgcacggtgttgaaagaggcgtcggtctacgacgaatgcgggttaatggtcttgcggtgtggggcgctgggcgatggcatcgagaacgcgtgagtgggtggcgatccattcggccgcgtcggggttgatgttgcgggcgacggtgtcgatcgctgttacgtagtgggcaagcctgcgaatctcagcttgttggtcagggtgagcgctgatgaggggctcttgatgggaggcgcggttacggacgtggcggatgagctccacgttttcctcgaagtcgcgtcggctacgccccgggtagtgaggcatacctccgttacgtaagtcagtgagagctttccatacggttgcttccaggcgcggggtgagcagaaagcgccagttgtccagtgacagactcgccacgatctgatcaggggtcgcatcgagcctcgcgcgccgcagtcgcttctcggccctgtcgacgttacgcgggaaaccaccgagccgatagctcggggattcccaccaacgccgtatgccagtatcggcgctcaggcgcacgtcaatgaagtttctcaggagtacctcgacatggctgatgtcttccaagaacgctttcgagatgcgggtgttccacacgtaccacgcatcgactggttcgatccggtagcggctgagcctggcgggtgagaaccactcctgcaacgtctcacgactcaccgtgggagcgtggtaagattgatgacgataggcctcgggaaggtcaatgccgcgaaatatcggtatacccccgaggtcattgtcttgcccaggcccctcctcgcatacttgcggggcgtcattggctgccgtcatctcgtctcttcccggtacgtggctgtccatgttcacgggcaggtacggcaatgaggttcccgcacacaaacctctaccaaacatacgctggcaagcc

SEQ ID NO: 157 - DNA, 1055 bp, Propionibacterium acnes
  source 1..1055: mol_type = genomic DNA
cccctaggtcctgatgtgggtcgaggtccttggaatgatggaagttcctacacacccatcgccaaagacctcaacatggacaacgctaccttcaccactccctcatctgtgaagagccagtttatgcacggtgttgaaagaggcgtcggtctacgacgaatgcgggttaatggtcttgcggtgtggggcgctgggcgatggcatcgagaacgcgtgagtgggtggcgatccattcggccgcgtcggggttgatgttgcgggcgacggtgtcgatcgctgttacgtagtgggcaagcctgcgaatctcagcttgttggtcagggtgagcgctgatgaggggctcttgatgggaggcgcggttacggacgtggcggatgagctccacgttttcctcgaagtcgcgtcggctacgccccgggtagtgaggcatacctccgttacgtaagtcagtgagagctttccatacggttgcttccaggcgcggggtgagcagaaagcgccagttgtccagtgacagactcgccacgatctgatcaggggtcgcatcgagccccgcgcgccgcagtcgcgcctcggccctggcgacgttacgcgggaaaccaccgagccgatagctcggggattcccaccaacgccgtatgccagtatcggcgctcaggcgcacgtcaatgaagtttctcaggagtacctcgacatggctgatgtcttccaagaacgctttcgagatgcaggtgttccacacgtaccacgcatcgactggttcgatccggtagcggctgagcctggcgggtgagaaccactcctgcaacgtctcacgactcaccgtgggagcgtggtaagattgatgacgataggcctcgggaaggtcaatgccgcgaaatatcggtatacccccgaggtcattgtcttgcccaggcccctcctcgcatacttgcggggcgtcattggctgccgtcatctcgtctcttcccggtacgtggctgtccatgttcacgggcaggtacggcaatgaggttcccgcacacaaacctctaccaagcatacgctggcaagcc

SEQ ID NO: 158 - DNA, 1055 bp, Propionibacterium acnes; identical to SEQ ID NO: 157
  source 1..1055: mol_type = genomic DNA

SEQ ID NO: 159 - DNA, 1055 bp, Propionibacterium acnes
  source 1..1055: mol_type = genomic DNA
cccctaggtcctgatgtgggtcgaggtccttggaatgatggaagttcctacacacccatcgccaaagacctcaacatggacaacgctaccttcaccactccctcatctgtgaagagccagtttatgcacggtgttgaaagaggcgtcggtctacgacgaatgcgggttaatggtcttgcggtgtggggcgctgggcgatggcatcgagaacgcgtgagtgggtggcgatccattcggccgcgtcggggttgatgttgcgggcgacggtgtcgatcgctgttacgtagtgggcaagcctgcgaatctcagcttgttggtcagggtgatcgctgatgagaggctcttgatgggaggcgcggttacggacgtggcggatgcgctccacgtttttctcgaagtcgcgtcggctacgccccgggtagtgaggcatacctccgttacgtaagtcagtgagagctttccatacggttgcttcccggcgcgaggtgagcagaaagcgccagctgtccagtgacagactcgccacgatctgatcaggggtcgcatcgcgccccgcgctccgcagtcgcgcctcggccctgtcgacgttacgcgggaaaccaccgacccgatatctcggggattcccaccaacaccgtctgccagtatcggcgctcaggcgcacgtcaatgaagtttctcaggagtacctcgacatggctgatgtcttccaagaacgctttcgagatgcgggtgttccacacgtaccacgcatcgactggttcgatccggtagcggctgagcctggcgggtgagaaccactcctgcaacgtctcacgactcaccgtgggagcgtggtaggattgatgacgataggcctcgggaaggtcaatgccgcgaaatatcggtatacccccgaggtcattgtcttgcccaggcccctcctcgcatacttgcggggcgtcattggctgccgtcatctcgtctcttcccggtacgtggctgtccatgttcacgggcaggtacggcaatgaggttcccgcacacaaacctctaccaagcatacgctggcaagcc

SEQ ID NO: 160 - DNA, 825 bp, Propionibacterium acnes
  source 1..825: mol_type = genomic DNA
cgcacccgccgcatcgtgacctcatcctcacgctgccgatcaccgtcaaccagatggtcagccacgatggtgttcacaccccatgactcatgcagttgcctggccaaggcgcccaacacctgctgacgcacctgtgacttgacgtcatcatcctccagatcctgtgtaccaaccatcacggaggccaacacatcactgcgttgctgaaccagggtgttgacgacgtcgacatcgtcgatacccatgggattgttggcgcgcgcggccacggcatgaaacgtgttggactgcaaattctcgaccagaccacgccgatagtcgttgaactgggaggtgtcggcaatgacaccggtcatgatgtaggccgacccctcggacaaggccctgtaggactcgtcgacgaacgccaccaaccccggccgccgccggtaaagtcgacctgcttcctcgtcagccagcaaccatgacagtttttgccccatatgtcctccttgctgacatgacctcgaacatggtaaactttccgtaggaaaaacggggcaagtactttcgagcggctacctcggcccccggtgggctgtccagccttgtgcggaccgaagccgggggattccttatgtttgcggcaatgatgccgctgcaccccctcatgccgtggtgtggtcctttccccgtgtgcggtgtggtgcgtcgttgactggtttgtggccccgagccttactctgaccggtaggagaacggtgtggggtctacggatagcccactcggctcccggtggaatgtccaacagggtagggttgatgagttggtccatcaggaccgtcc

SEQ ID NO: 161 - DNA, 825 bp, Propionibacterium acnes; identical to SEQ ID NO: 160
  source 1..825: mol_type = genomic DNA

SEQ ID NO: 162 - DNA, 821 bp, Propionibacterium acnes
  source 1..821: mol_type = genomic DNA
cacccgccgcatcgtgacctcatcctcacgctgccgatcaccgtcaaccagatggtcagccacgatggtgttcacaccccatgactcatgcagttgcctggccaaggcgcccaacacctgctgacgcacctgtgacttgacgtcatcatcctccagatcctgtgtaccaaccatcacggaggccaacacatcactgcgttgctgaaccagggtgttgacgacgtcgacatcgtcgatacccatgggattgttggcgcgcgcggccacggcatgaaacgtgttggactgcaaattctcgaccagaccacgccgatagtcgttgaactgggaggtgtcggcaatgacaccggtcatgatgtaggccgacccctcggacaaggccctgtaggactcgtcgacgaacgccaccaaccccggccgccgccggtaaagtcgacctgcttcctcgtcagccagcaaccatgacagtttttgccccatatgtcctccttgctgacatgacctcgaacatggtaaactttccgtaggaaaaacggggcaagtactttcgagcggctacctcggcccccggtgggctgtccagccttgtgcggaccgaagccgggggattccttatgtttgcggcaatgatgccgctgcaccccctcatgccgtggtgtggtcctttccccgtgtgcggtgtggtgcgtcgttgactggtttgtggccccgagccttactctgaccggtaggagaacggtgtggggtctacggatagcccactcggctcccggtggaatgtccaacagggtagggttgatgagttggtccatcaggaccgt

SEQ ID NO: 163 - DNA, 769 bp, Propionibacterium acnes
  source 1..769: mol_type = genomic DNA
ccttcaccactccctcatctgtgaagagccagtttatgcacggtgttgaaagaggcgtcggtctacgacgaatgcgggttaatggtcttgcggtgtggggcgctgggcgatggcatcgagaacgcgtgagtgggtggcgatccattcggccgcgtcggggttgatgttgcgggcgacggtgtcgatcgctgttacgtagtgggcaagcctgcgaatctcagcttgttggtcagggtgagcgctgatgagaggctcttgatgggaggcgcggttacggacgtggcggatgagctccacgttttcctcgaagtcgcgtcggctacgccccgggtagtgaggcatacctccgttacgtaagtcagtgagagctttccatacggttgcttccaggcgcggggtgagcagaaagcgccagttgtccagtgacagactcgccacgatctgatcaggggtcgcatcgagcctcgcgcgccgcagtcgcttctcggccctggcgacgttacgcgggaaaccaccgagccgatagctcggggattcccaccaacgccgtatgccagtatcggcgctcaggcgcacgtcaatgaagtttctcaggagtacctcgacatggctgatgtcttccaagaacgctttcgagatgcgggtgttccacacgtaccacgcatcgactggttcgatccggtagcggctgagcctggcgggtgagaaccactcctgcaacgtctcacgactcaccgtgggagcgtggtaggattgatgacgataggcc

SEQ ID NO: 164 - DNA, 603 bp, Propionibacterium acnes
  source 1..603: mol_type = genomic DNA
accagatcggccacatccgtcttggcccatctccagcccgccagacccagggaggccatcacctcatcgacgccgcgccgggtggtctcatcaaccccgtcaaacagctcgggccacctcgatgatgccgtccgtgaacgatccagattcatgacatgctcctcttcacagatgccgacgacgatcaggccgtggccgtggcaacggggtgacctgccggcgcggctcacgacgttgagccggaaccacacgagacgcaccagtgtgctgcgccgtcttgagtcgggcgctgtactgggccctggcgctgtggtgaacagcccgacgaagcaccgaccgccggctgtcctcatcgccagggcgaggcatggggcgcggcatggtgcgcccggtagcagcatccatgagggtgatccggtcagccaaaatgccgagccggttttcccacttccggggccacggcaccagcaggtcacgctgacagcccacgccgtggcgtcggcagtccacaacattttctcacggccaggatgcgagtgcagcagctccaccggaacaccagcatcacgcacccgccgcatcgtgacctcatcctcacgtgcc

SEQ ID NO: 165 - DNA, 599 bp, Propionibacterium acnes; identical to SEQ ID NO: 100
  source 1..599: mol_type = genomic DNA

SEQ ID NO: 166 - DNA, 599 bp, Propionibacterium acnes; identical to SEQ ID NO: 100
  source 1..599: mol_type = genomic DNA

SEQ ID NO: 167 - DNA, 599 bp, Propionibacterium acnes; identical to SEQ ID NO: 100
  source 1..599: mol_type = genomic DNA

SEQ ID NO: 168 - DNA, 599 bp, Propionibacterium acnes; identical to SEQ ID NO: 100
  source 1..599: mol_type = genomic DNA

SEQ ID NO: 169 - DNA, 599 bp, Propionibacterium acnes; identical to SEQ ID NO: 100
  source 1..599: mol_type = genomic DNA

SEQ ID NO: 170 - DNA, 599 bp, Propionibacterium acnes; identical to SEQ ID NO: 100
  source 1..599: mol_type = genomic DNA

SEQ ID NO: 171 - DNA, 599 bp, Propionibacterium acnes; identical to SEQ ID NO: 100
  source 1..599: mol_type = genomic DNA

SEQ ID NO: 172 - DNA, 599 bp, Propionibacterium acnes; identical to SEQ ID NO: 100
  source 1..599: mol_type = genomic DNA

SEQ ID NO: 173 - DNA, 599 bp, Propionibacterium acnes; identical to SEQ ID NO: 100
  source 1..599: mol_type = genomic DNA

SEQ ID NO: 174 - DNA, 599 bp, Propionibacterium acnes; identical to SEQ ID NO: 100
  source 1..599: mol_type = genomic DNA

SEQ ID NO: 175 - DNA, 599 bp, Propionibacterium acnes; identical to SEQ ID NO: 100
  source 1..599: mol_type = genomic DNA

SEQ ID NO: 176 - DNA, 645 bp, Propionibacterium acnes
  source 1..645: mol_type = genomic DNA
ggttgatgagttggtccatcaggaccgtcccggtggctgcgtcaatgatcgatatttcgatgatgcgcccgtccaggtcggtggtttcggtgtcgaggatgactccgactccgggttctaggagttgttcggggatccaatgggtggtcatcgtgtggctcctacagggagtgtctgggtcgggcagcggtgcaatacccgcgccatagcggtcttctctgcggcggtgacccacagctggtacttcattttgacggcgatttggcgggccacatagtcgcatctgtaggccttgttagggggtagccaggtcgctgcatccctgtctcgtttggcctcattagcgggtccgtcgacagccagcaagttcaacgggtcgttggccagggcggtgcgttgcagcggtgagagtttttgcgcgccggtaatccacgcgttcccgagggctacgacgtggtcgatttggactgttgtcgaggtgtgccggccgcgccgccaggcgagtgtggacccggtgtaggggtcgtggagtcgcccggagacgaccacgcatcgtgatccgggtttcaggtgggcctcgaccaggtcgcgggcaagggcatcgttgcgggtgtcgcatccgttgtggccccaggggcgggtcaa

SEQ ID NO: 177 - DNA, 588 bp, Propionibacterium acnes
  source 1..588: mol_type = genomic DNA
acaaacctctaccaagcatacgctggcaagcccccctctcggccccaccacaacatcaattgctgactcgaacacctttgaggcagcgctttcggcttgcgcaaccccacccacgacaccgtccgcttactactcgaagctgagggattcagaccccacctacaccctcgattgtgaagagcctccaaagcccgatacaacgtctggcgagacaccgtgaacgacctcgccaccgcagcaacgcaccagcagcgcgggatggcttggtattagcccagcgcagggcccccaggcaccagccctaacgaccccgcacccgacgtggctagaggataagccgcacgggaggactccatacccgccgactcattccagcccgccaccagccgagccatatgatcaaccgcccgcggtaaataatccagccactcacgccggtcgtacaaggaaccggccccgctccaggcgtgtgcccaggatcgccacaacacgtcgagctcgaccaccacgcccggaatagattcccactccaaatccggatcagcggccgccacgtaccagatcggccacatccgtcttggcccatct

SEQ ID NO: 178 - DNA, 588 bp, Propionibacterium acnes; identical to SEQ ID NO: 177
  source 1..588: mol_type = genomic DNA

SEQ ID NO: 179 - DNA, 586 bp, Propionibacterium acnes
  source 1..586: mol_type = genomic DNA
aaacctctaccaagcatacgctggcaagcccccctctcggccccaccacaacatcaattgctgactcgaacacctttgaggcagcgctttcggcttgcgcaaccccacccacgacaccgtccgcttactactcgaagctgagggattcagaccccacctacaccctcgattgtgaagagcctccaaagcccgatacaacgtctggcgagacaccgtgaacgacctcgccaccgcagcaacgcaccagcagcgcgggatggcttggtattagcccagcgcagggcccccaggcaccagccctaacgaccccgcacccgacgtggctagaggataagccgcacgggaggactccatacccgccgactcattccagcccgccaccagccgagccatatgatcaaccgcccgcggtaaataatccagccactcacgccggtcgtacaaggaaccggccccgctccaggcgtgtgcccaggatcgccacaacacgtcgagctcgaccaccacgcccggaatagattcccactccaaatccggatcagcggccgccacgtaccagatcggccacatccgtcttggcccatct

SEQ ID NO: 180 - DNA, 586 bp, Propionibacterium acnes; identical to SEQ ID NO: 179
  source 1..586: mol_type = genomic DNA

SEQ ID NO: 181 - DNA, 584 bp, Propionibacterium acnes
  source 1..584: mol_type = genomic DNA
aaacctctaccaagcatacgctggcaagcccccctctcggccccaccacaacatcaattgctgactcgaacacctttgaggcagcgctttcggcttgcgcaaccccacccacgacaccgtccgcttactactcgaagctgagggattcagaccccacctacaccctcgattgtgaagagcctccaaagcccgatacaacgtctggcgagacaccgtgaacgacctcgccaccgcagcaacgcaccagcagcgcgggatggcttggtattagcccagcgcagggcccccaggcaccagccctaacgaccccgcacccgacgtggctagaggataagccgcacgggaggactccatacccgccgactcattccagcccgccaccagccgagccatatgatcaaccgcccgcggtaaataatccagccactcacgccggtcgtacaaggaaccggccccgctccaggcgtgtgcccaggatcgccacaacacgtcgagctcgaccaccacgcccggaatagattcccactccaaatccggatcagcggccgccacgtaccagatcggccacatccgtcttggcccat

SEQ ID NO: 182 - DNA, 582 bp, Propionibacterium acnes
  source 1..582: mol_type = genomic DNA
acctctaccaagcatacgctggcaagcccccctctcggccccaccacaacatcaattgctgactcgaacacctttgaggcagcgctttcggcttgcgcaaccccacccacgacaccgtccgcttactactcgaagctgagggattcagaccccacctacaccctcgattgtgaagagcctccaaagcccgatacaacgtctggcgagacaccgtgaacgacctcgccaccgcagcaacgcaccagcagcgcgggatggcttggtattagcccagcgcagggcccccaggcaccagccctaacgaccccgcacccgacgtggctagaggataagccgcacgggaggactccatacccgccgactcattccagcccgccaccagccgagccatatgatcaaccgcccgcggtaaataatccagccactcacgccggtcgtacaaggaaccggccccgctccaggcgtgtgcccaggatcgccacaacacgtcgagctcgaccaccacgcccggaatagattcccactccaaatccggatcagcggccgccacgtaccagatcggccacatccgtcttggcccat

SEQ ID NO: 183 - DNA, 592 bp, Propionibacterium acnes
  source 1..592: mol_type = genomic DNA
cccctaggtcctgatgtgggtcgaggtccttggaatgatggaagttcctacacacccatcgccaaagacctcaacatggacaacgctaccttcaccactccctcatctgtgaagagccagtttatgcacggtgttgaaagaggcgtcggtctacgacgaatgcgggttaatggtcttgcggtgtggggcgctgggcgatggcatcgagaacgcgtgagtgggtggcgatccattcggccgcgtcggggttgatgttgcgggcgacggtgtcgatcgctgttacgtagtgggcaagcctgcgaatctcagcttgttggtcagggtgagcgctgatgaggggctcttgatgggaggcgcggttacggacgtggcggatgagctccacgttttcctcgaagtcgcgtcggctacgccccgggtagtgaggcatacctccgttacgtaagtcagtgagagctttccatacggttgcttccaggcgcggggtgagcagaaagcgccagttgtccagtgacagactcgccacgatctgatcaggggtcgcatcgagcctcgcgcgccgcagtcgcttctcggccctgtcgacgttacg

SEQ ID NO: 184 - DNA, 570 bp, Propionibacterium acnes
  source 1..570: mol_type = genomic DNA
accagatcggccacatccgtcttggcccatctccagcccgccagacccagggaggccatcacctcatcgacgccgcgccgggtggtctcatcaaccccgtcaaacagctcgggccacctcgatgatgccgtccgtgaacgatccagattcatgacatgctcctcttcacagatgccgacgacgatcaggccgtggccgtggcaacggggtgacctgccggcgcggctcacgacgttgagccggaaccacacgagacgcaccagtgtgctgcgccgtcttgagtcgggcgctgtactgggccctggcgctgtggtgaacagcccgacgaagcaccgaccgccggctgtcctcatcgccagggcgaggcatggggcgcggcatggtgcgcccggtagcagcatccatgagggtgatccggtcagccaaaatgccgagccggttttcccacttccggggccacggcaccagcaggtcacgctgacagcccacgccgtggcgtcggcagtccacaacattttctcacggccaggatgcgagtgcagcagctccaccggaacaccagcatcacgc

SEQ ID NO: 185 - DNA, 570 bp, Propionibacterium acnes; identical to SEQ ID NO: 184
  source 1..570: mol_type = genomic DNA

SEQ ID NO: 186 - DNA, 581 bp, Propionibacterium acnes
  source 1..581: mol_type = genomic DNA
cccctaggtcctgatgtgggtcgaggtccttggaatgatggaagttcctacacacccatcgccaaagacctcaacatggacaacgctaccttcaccactccctcatccgtgaagagccagtttatgcacggtgttgaaagaggcgtcggtctacgacgaatgcgggttaatggtcttgcggtgtggggcgctgggcgatggcatcgagaacgcgtgagtgggtggcgatccattcggccgcgtcggggttgatgttgcgggcgacggtgtcgatcgctgttacgtagtgggcaagcctgcgaatctcagcttgttggtcagggtgagcgctgatgagaggctcttgatgggaggcgcggttacggacgtggcggatgagctccacgttttcctcgaagtcgcgtcggctacgccccgggtagtgaggcatacctccgttacgtaagtcagtgagagctttccatacggttgcttccaggcgcggggtgagcagaaagcgccagttgtccagtgacagactcgccacgatctgatcaggggtcgcatcgagccccgcgcgccgcagtcgcgcctcggccctg

SEQ ID NO: 187 - DNA, 48365 bp, Propionibacterium acnes
  source 1..48365: mol_type = genomic DNA
agcatctacggcgaaggccccgactgctccgtactcaccaaccgcatctacaccgaccagcccaccgatgtgaccgctgcactcgccgactacggcttcaccatcgacaccaccaacacatccaaaaccatcctcacgctcacccgcacagccaccatctcccacctgctagccatcctcgatggcctaccccaagctgaggggactcactggctcaacactcaacccgacctccaccacatcaccctcgacgactccaccaccggctgggccaccaaccgcaccgacgacaccgacaccggcgtctgctacgacaccagcacccacaactggcagatctgctgacagcatgacgggcctgcccttgagggcaggcccgctaccacctgactctccctccgaaaagagggaaccacctctcggccagagcggccgagcttgagagatgagagcaataacgttcatggtcgtctccccgagtggtggggtgcgttacttagcgccgccacacggtgacggtgtcagtgccgacaaacggagacccctcgggcccacgaatgaacggggccacccactgcaggcgtcggagactgcgcttgggaccgtagggctggtgtgtccaatgcccccgcaccacatgacgggtcgtcaaccgcctaccggtcgcatcggtggtggtgtgcacctgcctcataggccgcatatcgaccacatcgtccagcgtgtcgtctccgacgaacaaccttcgccccggcggcgaatcggtcgctgtacagctagagcccgcaagatcgtcacaggagtcccttccctcgggttgcgcctcccgttttttgtactaccatattggtatggccatcgagttcactgatagtgccggcaagcacgggttcactcgcgaggacgcaatccacgcgatgcagacccctgaggtcttcacgccccacttcgaccactcccgtaccgacggcccggatgtcgcggcatgggttggtcccgcgaggggagggaggaccatcgaggtgttcgccacgttggttcccccggacacggttaccgtcttccactgcatggacgtgcgagccacgaccatcgccaagctgaatggagagcgagcatgagcaccacccctgccgggttcgacttcgacgctctggccgagtgggccgagagcgatgaggcgacccacaccccgcaaaccagccccgtgttccggggcaaggacgccgcgcgcgccagccgcgcattcctcggccgaggacggcccaccctcggcgcggaccacgccaccggcgagggccggtcgccccgccgtcaggtacggctcgacgcacgcaccaacgcgcgactcgacgcctacgcagccgcaaccggcaccagcgcctcccagatcatccgcgacgccctcgctgactacctgcccgcctgatcccaccccaatccactcgggcgcctgtcagtgccccctcttctgggtggtggtccggggcgtcaccgccccggaccagttgggtagtcatctcagttgaaataagcgattagtgatacgcccctcctgctttccggtgctgtcatgagcgtctgacaacagcgacacctcggggcagccgacggacagtcctctggctgccgctctgatcccatgcccacggcacgaaggtgtcggacagctcggtctcgtcatgtgcccaaatagcgtcgtgggcctgtcgccaagcttctcgggagccccacacgggcacgaccgggccacaccggtgtcctggtctccagtgtcgcgacactgtcgatttcggtacgtgcaatgcggcggcggtttgacggatcgacatcccagactcccgcgcgtcccagatcgccatgtggagagtatttgcctccagtgcggccgccacacttgcacgctctcgcgcacgctcgaatgcccgcctagtgctctcaaatgtcgtcacgacgcctccccctgaaaatactcagggtgtcccacggtgggacaccctgagtatttcataccccaactcgcctcaccacacgtcgacctcgacaccgatcaagcgacccgtatcagcgacattgccgtaccgctgccccgcctggtcctccagccacgacaacgcatcccgaaacagcccgacgtcttccaaagctaaaccacagtcgtagccgcccttgtcccccaaccgcacaatctggcgctcccggtggcctccctcgtcgacctcgatccacagtttcgcgtgcatccgctggcctcggccctctgacaggatctcggtgagcaggtcggaggcttgtcctcgcgcatcctcgttactgcgggggaattggagtatgtgggaggaacgacgatgggggaggttggtgacctcgtgacgcagcaggttgcgcttgtgcatctgctgatcgagacgctcgggctgacctgttgacggggttgagccgtggcgccgcttcctcggcggggtctcgatccgttgctcttccggcggttcggcgtcaggttgtggtgcgcgatctcccctaggacgggggggctcgccacctatatccgagggacgatgagacggccttccacgcttgctgcgtaccttcgcggtccggcctttgcgatcatgccgacgccgcggcggggtaacctcctcgccccgctccaactgtgttaacgcctcgaccaggttggtgccaggcttaagccctttcagcacgaaccgcaccaggcgggggtctcggccgattcgtcgggcaatctcggcttggctccacccttcggctaacagggtgcgcaccaagtcctgagcccgattgtcacgctcagtcactggtcgcctcctcggggagtcctacttgctcggcctgctctgatagagcagcccgctccgatccggtctgaggcgcttccaaagggcccggcaagacacctttgacacgcagccgcccgtccttgccgtcatcgccgcccccctgggccacagggagcgcccaggggggcacgttgctggtgtagatggcgtcgccgtggatagccagcagggtgcgggagttcatgcgtagtgctcctcccttggttgtggcgttttttccggtggtggggtcggcgatgggtgtgttgagggtgcgtacgcgggacagggcccagatgcgggcggcgatttcggggtgccaggtgtcggggtcggggcggcggcgggcggtttggtattggtaggcgatggtgtcaccggttttgttgcggatgacgtcgaagccttcgatgtcggaggggatgtcgtcggcgtcgtagacgacggtggtggtgacggggttggaggccgacatttggccgatggtcacgcgcagcatgtttttcaacgcggaggtgaggattgtcgtggcggtggggtttttgtctgcccagcgtttctcggcgatgtcgatcatgtcttggatggttttgacccatcctcggatgggatcgactttggtcagtttgatcccttcgaggaactcgatgggctgggtgatgggcccatctggtccggcttcggtgtcccagccttcgtcgatggctagtttcagttcggcggtatcgacccatgtttcgtgggtggtgccgggcacgttgggccaaaaccatcctgctcgtcctttggtgcgtttgaccggtagtaggccgatgtcgtcccaccaggatggcacggtgaagcggatgtggtagcgggccgggtgccaggggttgttggtgaacaggtcgcgggcttcggtggcgctgagcagagtggcgggtgcggcaccgatctctccggtcactgatccggcatacatgaatcggccgtcgatgtacacgaagttagggatagggccggcaggcacggtggggcgccagcccttttcgcggtcctcggggttgccgtcgtcgacgcatagttcgtagcggtgctgaggggaggtgtgttggatgagtgcgcccagttcggggtccatcggctccatgcgataggactcgggggtccgtagcttccagaggttgattccttctgctccggggcggtccatgagggcccagtcgcggtcgattctggtggcgatgatgtgggttaattcgcgccatgcccagcgggcctggattggggtgagggtctggccagggaaccattcatcagcgaccagaatgtcgaggttgcggtcggtttctttgtgggtgaaccggcctcgggcgggccgcccggacagcatgaacaggccccgcacgtgccagtcctggttgaactcgcgggtgtgagcgggggtgtcaggcagcagccaggattgaggctggtcggggatgttaccgcagacgatcaggcgtcgggcgttgtggtgtagcgcggttgttagcaggtctgacagggtcgcgtgcttggtgcgtcgtccccccagcactggcaggatctcgtttccggccgcgtcgactccccgggcggtgtcgatgtctagccacactgtttcggggtcggggggccgatgtggggcgggacggcgctgctcctggtcgtctctcatggtttcctcctttgggccagggagcggccggcgtcgagggcgttcatgcgctcgcgttgttcttcgcgtagttggtagacccggcctcgtgacactcctgctgcctcggcgatggtggtggccggcaggtggccgatggcggcagcgtcggcaaggacgtcacgccaggccaggtcaatggttcccagctgggctagagcttcgtcgcggcggcgggtggcatcagccactacggaggcccaccctgtggggtggatggtcttgacgacgattcggttgtggcggatggggccccatgcatcagcggggacttgccagccgtgattggcggcggactcggtgatcttgaggcgtcgctcaggtgcgcgggtgcgggcagtgacgtcggtgttccaggtctggactggtacccacgtcccctctcggatgcgttcgatgacgcacgtggtgacctcgtcggtgactgtgatgaccagacgataatctttcccgtctggggtggttcggtagctgggcatttcaccctcccctatctgtcaaatgagctagacacagtgtctatttaatttgacgcaaagtcaagtgtgctagacgcctttgtgtggatccgcccgcccagacaggcactcacgtctcatgacccgccgcgacgtcttaacgaaaccaaaccgcttatagaaccgctccgcagcgggcccggagggcttcagttcgagggtgagaccgtgctcgtcggcccattggcagacttgtgtgaggatctgtgagccgtggccttgagtgtgggggacggcgtggacgcacatgagcatggggccgtggcggcgcgctggcggggccacgtaggctccgccatgccagtccggtgtggtctgccagcttcgccatgtcgcggtacgccagtggtgggcttcgagggccaccatgatcaccgcgacgacgacgagcgttgcggccccgatcatggccagctcaccctgaccaggccagttcccgcagatgatccagtctcttaacgcccagatgatcgcggcttccacgcctgctgcgatcgggatgagcaaggcagaacgaaggtgtcctgccatgatctcggtgatctcgctgcgatgccatgacaaggagaattcccacgactcttgaatcatgctgatgtgtgaacggcttcttcggcttcgccctgccatagtttctccaaacgacgctcagccagctcgtcgggacacggcgacagcctgccgcactcggagcagaccccgaagtggcgcgagagagtgatgaccggctcgtcgggagcatgaaccgactcgatgcccgggtgctgctcatcggtgagtcccgaagcgtggctgatctcgatcagacggaggtggaccatgccgtcgtagctgtcggctctctcgacatggaacgggtaggagccgtccgcggtgtggcctgcaaccaggtccccgatcttcaactggctggcggtcatggttcgcaccggcggcagcggggtccgggtcgcgttgatcctcatggtctctccttgcttctgcgccttcatagatgaaggtgccacagccggggttgatgtgcggaaccacagccactttttcaataaatccatcaccacggtctcaccccttcccaaatgtgtaaaccatgatttacacatttggggcatgatcgaacccacaaccatctccaccacgccccgcgtggccatcatctcccccagcgggccagcacggttctggggcgagcctcccagcatcgcactgcgccgacacggccggtcccccatgaggtcccttccttccggggccctgctgctggtgtgggacgtcaccgttttgaccgggcccactctcggccaccgcgtgcgtcctctcagtaaggacgccgagctgactgcccggcgctggctcgaccaggtcgccgacaaccccggcttcctcgacacccttatcgaggccgcccgcatcaccgatggatggcatcacgcgacgcctccgcacattcaggccccttaccggacccttcatcagtgaacggaggtacaacgacatgaccagcgacattgacattgaccggacccacaaacccgacgaccgcgccgaggctcctctttaccggtcctgggccaggagactcgtgcacgtctccgggatgccctggcgtatcgtcgccgccttggccggggtctcccccacctccatgcaccggcttctattcggccgcaacggtcgacccgtggaatggatcggcatcaatgatgctcgcgccctgatggatatcggcatcgatgatctcgcctcagcgtccaccgaccgtatcccggcccgcgaatcccgcgagctgttggtagccctgcacaccctcggctggaccgatgagcatctaagccgctggctgaccagttccgacctcgacctggccaccacccccaaggccctctacgtcacccggctatccgccgcccgcatccaggccacctacgacatgctcatcagccagcccgtccgccgctgcggccacccccgcaccccgcctatctcgtcccagactccggttacctcgccccagcccgggcccgaggatgccgaaacgttccagcccgccctgttcgagctagccgactgcgcatgagaccccacacaaacatggttgaatcgaagggctcagccagcagccagttaccaggagtccccgtgcgtctataccgcgctgttcttacccacaccgacatccagatcaccgtccgcatctggagcaccaccgaccacgactggacctggactcccctcgacacctggacccccgacccgaccccgaccacaccagcccaactggccgacgaactccaccgacacggatggaccacccccgaggaccccaccaccctcaccaaggtgactgtgatccccgagaactggcaggccctcgtcgaccacgccctcgctgcccgaaaccaccaagccaaccagctgcgcgtcgccgagaacatcctcaccgacatcctcggcgacgccgccgacgctggcctttccgtgaccttcctcgcccaggctgccggattgtcccgagctgccttctacaaacgcagcgctaagaccatcaactctatgaggcacgccgaccagccgcgcgaagacccctcccagctcacccgagccgagaaaacagcactcagcctgggcgacgagtgatcctcacacctcctgcgacagcccggccgtggagccttcccacacgtgtctagccagcactgaccgggaaaacctattcgcggcaccacaccgggcccactcaccagtcacctacacccccgactgcccctcgcgaagacccaaccagcgaaccaagtccccaatgcgcccaccacgatcagcacacccacggcgaccaccaggtgggaagcactaaccgaccccaacaacccaagatcaaacaggccctgcccgggaacgccgagcagcccgtgatcgcgaagccatgctccgagatgaccgatgattttaggggccatcttcttcagcagggctatccctccgataccaacaacgatgaaggcgaggatttcttcgcatccgttgtttccttctccggtggggccgttcatgctgccttctcggggtggacggccagccagccgatgaggttgtcggcgacctgtcctgaggtttcgatcagttcgacctgtccggcctgccatgcccgtgatgtgccggccagcaatgatgccggggcccctgctgcgcggctgagagaagcgacttcagtcaaggcggtgcgtagctcctcgatggcgctttcgatgtaccaactgccgtcagtactagtctcagcggcatcggtggtagcgataagagcatcggtgaggtcgtcgacggcgcggtccagatcagcgatgtccggtagggctacaggagtcatggtgtgtcttccttctagggtgccttcactggtgaagggtccctagccccggccgatgtgcggtgctgtgggaaaaatgcttcccattggtccgtcttagttaggaaacttggcctaagtgctgtcgagggtcgcgtgttcgtgaccggttcgaagacactgccgccttgccttcttgtcagtggcgcttccgagatggggtcagtgggcgatggctaggccgatgagggcgccgctgcacaggctgggcgcccagggaaggaatcgggtggtgtggtgtcggaaccgatcgattagggcatatagggcgatcagagtcagcccggcgatgaccgtggcgtggatcgtgtcgatgccggttgctgcggccggggctgcccacagtggtgtgatgcgcacgtcggagaagccgaagccgcctcgggagatgacccagacgatcatccacgctgcgaagatgatggcggtagcgatgacagcacgtatcgccgcagtatggtccgagagggcggtaacgactacagccccgatccatccggcccatccggtccacgctaggactgccggtatccatgtggtgatggcgtcaatgacggcaacccatgccccgatggtggctagcagagcccaggccggccaggtgggtgctggggcccacgctacggcggcgatcatggttgtcgcagatgcagcacagacagcgatcaagcttcggagactgtaggtgtcgcggtaggcgatcttgtcggggctggcggtagctggttctggcaggacgcgggtgagggcaggccaccctgcggccgcaatagccatcacggcgaccacccacacaatctgttgcatgggtctcatcatggcccatcaacgccgaaaatgggtggccgacatgggttcactcgtcaagaggtgtacgggcggccgtggcttctcctgcgccgagcatgagggtgccagaatcctcgccagccgattcccagtcgacgatgacctggtcgccgtcaacgctggattcggcgatggtcacccattgcccgtccatgtcgatgagcatcccggcggccagctctgtggcggcaaccgggtgggctgggctgtagaggaggtcgatgtcgcgggcagggtcgtcgggttcttcggttacctcgggtggggtcgatctggctgtctcggtgtcgtcggccaggtcggctcccaggatgcgttcccattcggggctggttttcttgcccgctgaggccatcgtctcgtcgatctgttcgtcagtgggccacacaaatttctttttggtccaggtcgtggtgtcgggtcgcagctgatccagcagttccaggtcttgcggggagtgggccttgcgggggtcgggggtgtagaagaattggacttccttgggggctgattcgccggataggtaggtgccgcggccgcgtttgccgaacgggatgcccacgccgacgtgttcggagccgaacatcatgcgggctccgtcagcggacaggggtccggtggcggcacgcccggagaagttgtctcggatttcgccgcccaggaactcggcgtcggggcgttgggtccccagatcgacgtggatacggcaggcggctgccatgcgcagcagggagccgatccagccgaaaacggggcattctccgggcatcccagagaccttgatcgttgaccaccagtttttcgcgttgccgtagaactggcggtactcgtcgatgaggaccagcacgcgggtgaagtcggtctcgcgagccccttcttcttcgatgcggcggtagcggtcctccatgagagaccacagccagtggatgagggcgacctggtcggggacggtagtggcgaccatctcgatgttgggccactcccgcaggcccaggtactcgatgcgtttagggtcgatgacgaagacgcgccagttgcggcgggcaccctcgacggcgtcgccgatcatggacaccgtttttccggtacgggtgcggccggccttgagctggtgggccatgacaccggagatgtcccagaaacaggtgttgccgtcctcgtcgacggcctgggggattttctcccagtctggggagtctgggcccggaagggccacgggtcggggcaccatcgagggcagggggtggcggcgggtgacggtgatggtgtcgtgttccaggtcgaagtcgctgcgccactggccgagcatcatcgccgaggtcaccgcggccaggcgcaattggatgttcgggctggacaaatgggcgccacgttggtggtgaatggtgaagccgtccaggttcccccgatcggttttccaggaatcgacggtgaccgccgacccatagatctgagtggctacttctttagcccgttccttgtctcggtccagatcggttttgtcagggtcaggggtcggggcgcggtattgcaggacgaacccgccggccgggatcgttgcggatgtcaccgtgaactctgccggcgaccaggcagccgcggccgcctgggtgagggccattggcatggtctcgacggcagcctcctcgggggggatggtgagggtcaggcgtcgcggatgcgtcttcttgcgattccatgtgactttctgcctcaccggcaccttcgccgccgactgaatggctaggcgagctgattcggcagtttcggtacgccggccagcgcgtagcgcccgtcgtgcgtgaaggctgcccaccacagcacagcccatacacggcagccaccagcgcggatcagcggctgctgcatagcccccggtagctagtaccgcacctgaccagccggccgcgatacttttccacgccggtttcgcgccaccaggaccagcgttatggacggtctgcttcgaggctgcggagggacgagacagcggagtgctggtcatgccgcggcctccttgtggcaggtcatttcacaggcatgccggccagcgatgatgccgtggcgcaccgccccggtagccgcatagaccgcgcacaactcaaacacggggcacccatcgcaggccgccgggttcatgctttctttgtcccacgatggtgggtcatcggtgcacggcacggccaggccatcctgttgagcggcgctgatagcggtgaataggcgcagctgggcgcgaacttggtctggggtcaggttgacggtgcgggctacacgcatggggttccttcctcttcaccagtgaaggttccctagacccggccgatgtgcggagggatttcagtgttttatcgaggtgaccagccagccggtctgcgctgcgggttcaggtaccagggtcagatgcagcatggtgtggtcggctaggggcacggcgaccaggggcccgtcggcgctcgccccggtgagggtgggagttccggccacggtggtggcgggaatctggttgggtttcgcggccatcagggagcccatgagggtcggggcggcgatctggacgagggcgactttgcgggcggcgggatcgcgggtcaaccagccgcgggtgaaggtgagcgcagccgacgtgatatcggggctcagcggggctggtgtggcggcggggtgggccgttgaggagggccatacgcgcggtagcgctggcgacatcgagcgggtcggagtggggtcaggtgtggggcttagggtccgatgtggcgatggggctaccgccccggtggtgggagacgagactggttgggggtggtgttgagggcgtgggatcagggtgaaggcagccaaactggccgggatgaggatgacggccgcgccgacacttcggagcgaggtcatgtgacgatccttcggtagctcgacgggttgccgtagatcttttccacgttgatgccactatgtgggttgtcggcgctaaccatttggcctccaccgatgtagacggccacgtggtgggcagggcttccccagaggatgaggtcgccgactttgagctggtcacgggccaccgcggtgccgactttctgctggtcggcggcggtgcggggaaggctaatgccgatacgccggtacagcgccgaggtcaggcctgagcagtcgtagccgccatcggctttgccgttgccaccccacacgtaggcgtaggagttgttgtcggcgatcgatttggcccatgccacggcttcggccaggttcttcgacacaccggtctcgttagcggccccggtggcacagttgtttgacaggtgccctgtagtagtggatcccactatttgtttggccatggtttcccatttggcgtaggcatcgggcagggctgagccttgcactgcctgagctgcctgcgtcagcggcatcttctgccagtcagcgatgtcgactaaaccgggaatgtggaatccagggccgccggccgatccggggccagcgtaggtgatggtgtggcctttcaagaacgcctcggtggcgtaggcatcattgttgacctgatccagagtcccgtaccagcccggcaggatgcgctgctgaaaggggccggcgtcaccgtcaccgttagccttcgctgaggtagggtcggccccaagatctgattcttgtttggcggtcatgatagcgatgaccgctgcctgggtaggcagtttgtcacgctggaccacagtgacgatggtggtcacgagctgcttctgcctggccgtgaggcctccggcacccacagtgcctccggtgacggtacccacgcaagcatccccgccgacactgccaccgccgccagagttgtcgtcgagggccccagagcctactgacagcagcggcacaatgatcacggtcgcgggcaagaccgccaggcccgccagcatcagcactgctgcactcaccacggcgatcacgtgagatgctttcaacgctgcccacctttcgctggtttgagggggcgacgcctgctggtacgcacaggcttggttggtccagtccgccgttggttggcaggcctgggtttgatcggcttgctgggacccggtttgggctccggagtcttaggctccggcttcacatgcctaggcacttcggctgcggtgggaggagtcagcacgtggcgtaccggcttggtgaccttctgggcacccgaaacaaccggcttagacaccaccttggcacctttgaccaccggtgcggctgccttcgcgccggccttcttgactgcacgatgcgctttgatagccccggcctcggcccggccaaccctgctagcagtagcatcgagggctctgtggcccgtcgttgccctcaccggtgcatccttgccctggcgggtctgcttagcgatcgccgacatgccgcctcgcaatgccgaaacatgattgtgggcgtgggcgatcgccgacatgccggccgtcgcgatttttgactggccctgcggggcccctgccccagcacgaatctgctggtaagccgccgacgtgccacgagcacccgccgccattcgcgccaccttcgcagccctagtcactcccgtcgacacgccacccgtggctaccgcagcagcacccgagaccacagtcgaggccatccgccttcgacccaatccggtgagcttgcgaccaccgctgcgcaccatccggcgagcaccccgcccagcccactggccaatcgccgacgccccttcggaacgcttgctgcgcatccaatcgttgatcttgtccctcagccccttctcgcccttgtgacgacgccacatggacatcaagaacccgataatccccacgagctcgagcatgttgacaaccatgaccttgatggcgacatcaccgtcagaggcgaaaaccgacttgatgatgagcatgaccacacccaacatcaccatcgacccgacaatgccgatcatcgagtacaagatcgaacacagatcccggatgagcggatctgtgcggccagggatagcccgcaacacgttgagcatcgacatgaacgccgaccacaccaacttgcacacgtagaaccagcacatgcccgcgaacaccagcaggaccacagccaaacccgccaccgtcgacgagtaaaagaagaaccccaccaaccacgaaccatccgcaatatcgccggcgtaatccgacaacccctcatcacagtcaccaaggtcgtcgcgagcatccgagacgtcatcgtaagggccacccttgagcacctcgatgtacttgtcgtggcacttcgcatcaataatgcggccatagttgagctgctgatgaaccggcgccacgaacgagtccacaatgatcgccgacagcttcggatccttcgagtctcccgtcgaggtcatgtcatcaggaatctcgacctcaccagcggtcgccgtcgcaggatcaaccgaactggtaatcatatgagacagcgccacaccgaactgctgggtgcgagccagcggagtagccaacgtcgtcgtatcgcctgcgaacttcgccaccggggccgccaagaaacccaacgccagcgccgcagcaatcgccgcacgcgcacccgtagcccacgcccctgccgtacgtcccctcatcatcttgacgaccacgcccacaccggcgcacgtcgtcagcaacgtcaacaccgttccaccccagctgtccgctcccagcggggccaaaaccttgtcgtggatgtcgttctgtaaccccaccagcggtccggtaatccacccgacccagctcatcgccacggtccagtccaacaaccggcacaacagggcaatgaccatcaggtacgtgttccaacacatgccaataatggaggcccacatagccttcagcggggccgtaacgccaccatcgtccatcgacatctggtactgaaacaagtgaataccgttggagtcagtcacattgaaaccgtcacccatccagcccagccccgggcccgatgccatggcaggcacactgctcagcgccaccaccagaaccagcgtggtgacgatgatacggaaccgccgctccccggccccggggcggcgtggatgacggctcacgctgtctcctggtcgtgctcgggcgggttggagctggcggcttcgcggtggggagcgtaggcaggtctcagtagtcgaatttcaccgacgttgccgtgttggtcggcgtacaggccacaaccggggcctccggggttgagggcaatcttgaccaggtcagcgaactcttcaggggacgttttagggtccacgcccaggaactcgacacctttctgggcgaggttgatgttgtcgcacagcaacacgatgcgatgctgaatgaggttgcggacggtctcgttggggtaatcggcctcggggtcgtgggagccggtgataagccaggcattggctcggcgggattcgcgcacgtactcgtcaatggcgtgggaggcttccggcgaggacgacatgtgatgaaactcgtcaacaatgaaagcggcgtcgcgggcccggtcgctgaagcacaccaggcgagccagacgggcaatgagcgcgtagagggctcggccaaacaccttgtgcgggggcagctgccgaaacagatgttctgacagcatctcctcggcgttaggaagagcgatgccacaagtgccaatgatgaggatgtcggcactcaggtcggcgggaggaaggtccgggtcaaagatggccgaagctagggaggccgagttctcgatgtcagcgaacacggcaatcctgtcagcgatcgcggtggcctcgggaaggtcgcactcctcggccaggtggcgggccaaacgcccacacgaggtgatctggtggtcacgcatgtaggccggtttgaggaccttggccagcgtggtcccggccacaccgatggtctccaagttaagcaaggtcagcaagaacgactgggcgacctgcccggccatctccgggggaaggatgcgcagcgggtccagcgacagcttggggtgggccgtgtcgacgatctggcgtctaaccccgtcgatagagttgacaaaggttacccactcccgctcatcggagttgtcggtggcaataatgcgcccgccccgggccgcgatggctgcgcacagccgcttctcggccatcgtcttgcccgcgcccatcttgccgatgaacgccaccgtgttgcctttctgatcctgagtgtcggcatgcaaatcgaggtaggccagcgactgcaacggggagcctgtgaccacagccaacgggatgccggtggtacggcccaaccggtactcaaccaccgggatagatgcggcgaacgcggaggcgtgagtcagctgacggtaggcgttaagcgaggaggagaaccggccaccgggccgggcagcccacagcaagtcctcctgacggcccacgggacgcacccacgtgaagtcaccgaacaccggatcattgacgaacgctcctgccagctcctcggtggtctcaaagtcaggagacgagacagtgacggtgataagagcctggatctcgacctcacgctcatcggcggccagctcggcgttgtagtcgacgagcacctgagcggaatgctcgatagacatgagggtcgaagcctgggtcatctcaccgccctcgacgttgtcgagctgatcgaccgtttgacggatagcccgctgatttttctgcatcgcagcgtgacgggtccgggccactccccggatcgccacgtcgaccggcacgccagtgtcgtcgatacggcccaaaaactcgtaggcaggccacgtcatcgtgcggggcaccttacccagcacgatatgggactggtagacggtctcgccggtgtcggcaccgattttgaggacgcgacgattccacgcctgagccgtccgggacatgtgggagactcgcttgtcatcctcgctggccagcaggtcggaggtcgcggcctcatcgatgaccaactcccccagcgcggcacgtccaacctcatccatgagggcgattccctcgccaggggcatcatcacgcaaccgggtcgggtggcctgacaggtgctgccgaagccagatctgttcatcaacggtgaccgggcggggttggaacgctgccggcagtttcgcaccgaattccttagcctgacggagggcccactcccgtgcgacacggccaggagcggtggtcatgagtccggcggcttcggtgattttgttgagggcggcggtccaggcggtgtgggtgcgtattttctggtcttggttgagtttgatcgataggaaccacacgcgccggcctagggattcggtttcaggctggtcgagggtggcgtcgatttcgtcggcccacacggggtgttcgctcaggtcgaggccggcggccatggcgtcgacgatttctgtggggtcggtccaggtgagggctccgttgaggcagaactcgtggcgggcgaggtggcggaataggtcgcggtgagctgcggcgacggtgagggaggcgttctcggtgacgggtcgctggaggggagtgagtcgccaggtggcccagatgtcgccggtggaggtccagacgaggttgtcgaagaggaaccgttcggggatggacatcatgactccttttcggcggcggcgaggaaggcttccaggccgctgcggcgtacagcgttcccggtagggtgcaggggttttctgggggtgggttcagatttcgaatgtgggaggggtttgtggatggtatcggtgtcctcggcgagggcttggtcgagcaggcaggtggccggggtgtcggtagtctcgtccagctcgtcgatcatctcgtcgaggaggttgggggtggtggatgcggcccacacaggtgggatagccggtgcgggtcgaggcggtgtggggaggcggagtttggtttggccccagaggggtgtgtgggtcatgccggcgggagtggtggcggcgtgagtggtcacacgccaccagcccgccagccatgccagaggtgaccaggtccagtcgatgcgaccaacaacgaactgggcgagccatccggcagccagcgcgaaaatgaaaccgcggatggtcatgcccccgtcgataattttgaagcccatcattgcggcaggaactacgccgccgacagcgagcacctgatagatcgtgtagggcccgccaggaatccttcgacctgaggaatccttaccgataatgcggggctgctggcgggcctcggtgtgccactgaatatccacgatcagctcttgcccaatccttgcatcatctgtccgaagaattggatcgcgttaccttcgataagccagtgcgccataccacacacaaacagcatggagacgatcttggccaggctcataccgtgtttgaagatgttgaacgcggcaatgcccacgactacgaccatggcgacggctcgcaccgcggactgaccttcacctgccttgatcgtcgtccattcgaagaggttctgcgattccagtggcagcaggaggaattgatcgagcatgagaggttttcctttcaggaagccgaccgggatggtcccggtactgacgggctggacggcacgggtgtgccggccaggggcagaaggcgtgacggctggtcgagggaggcaacctcccagcggcctgcacggctgacaagagtcaggccgtactggctggtccgggtagtggattcgtcgccggtgggctggcatgtcacggtcaccgtgacggtaatcttctgccggtctgagggggtggggacctcgtcaggtcccaccacatgagtggttttcactgatacgcatggggctgggtcaaccgcggtgaaagcggtccctgggctgctccatctcgacaggtcagtattcccggtcagcatggcggttaggaagcctgaagaggcttgggcggccgggtcggcggtgcgaagctccgaggtgtctagggtgggggccgaggccggtgcaggcatggggatctgtccaggtagacgcaaggcgatggccttgccgttggaatcgacgtggaccgggactgaccaggcctgtccgctcccggattggccgcccatggtgaccacggtgacctgccacaggctcggatcagacggggagacggtagcgtcataggcggtgacggtggtgggcgctggaccaggtttgcggggcatgcgcgcatcggtgatcttggccgccaccaggtgttccagattgtccaagtgcccggagtcagaggtcagcagaagagtagtcacctcgaccgcggtggctgaggcgatctgagctgtgcggcggtcgtgatgggtggtgtcagtgctgacagctgtggtgggagcggatgccggggccgccgaacggaccagggcaacggggccgcatgcgactccgcacagcacgagggcaaggaagcctttggtggccatcgatccggtgtggggccagggacccacgttttcctgtgcctgttttttcttggccgaccaacggcgggacttagggttagcggatgcaccttctggggtgcatgctcgtctcaatcgcatcggtcacctccttcactggatgaagggaccaaggaggtgaccgatgtgcggtcgaacccgaaaaagttcaaacttttttctgggtctgcctcaagtacgacagaaggcctgcatcatcacggcgttgtggtagcagatcttgcgtcagcgcaaatgtatgggcctcgtaggagtagctcttaggtgggtcccggtggttgcggccagggcgagggtgtcgggtatgtgtagcgctagtcccgggttcgtggtgtgagggcttttgggtgctgacatgcactacccattgctagacgctgtgctgtggcatggctggacgtctagcagacgggttgacatcacctttaggctggcagcgcccgaggccgcaggccagaggaagcggacagcctaacgattgacgtccccctctcctttccccaacctcctggatgtgtgggatcagctgtgccgctcccccgacatggcagacagcaccgttgcatgagaactgactgacactgtggcgccgcggaggtctcccgcggcgtccgctggggcgagtgcatgcctgtcagctcatcttttatcgtcatgtttccccttgtcagagcggtctttgcaaagtgacaacgtcaggggtcttgacgacaacatcctcgacaacatcgtggcggtggtctgtgtctcgtcagttcaacgcaccggggaaagaggcaccgctgatgttcaccaccacaaacaccctcaacgatgagtgggaccagattcgcgccactgagatcgattggcatgactgccctgaactgatgcactgcatcgacgttgatgatgtgttggccgtcattcctgccgcccccgacgccatcttgggctacctcattgcccgggctcagggcggtgacgagttggccacccgcactatcatccaagcgttcacaggcaagcttatcttgatggccacggccaccaaggtgcgccgtactaatgacggcttcaatgatctgttggcgggtctgtgggagacgatcatcacgtacccgttggatcgtcgccctgacaagatcgctgcgaacctcatcctcgacacgttgcaccgggttacccggttctggcgtgctgattcccccgatgaggaagaggctcacggtctggtgcccttccctgacactctcatcgccccagagcccgatgaggacgtcacagctagccaggccatcgccttggcggtggaccgcaactggattaccgaggacctagcccgcctcatgagccatatttactgtgacggtatgactggagctgatgcgggtcgtctgcatggctgcgctccagctacggtgcgatctcgatgccgtgatggtcgggccgtgttgcagcgcaacgccgagacgatcctggccgtctgctgatccctctcttgctcatgcctgccgccaccctacccctacctgctagaaacatagccatgtctccagcaacgcatctagcatatcttctagcaattgatctagctatgtatatagctgatgatctagctatcatatagctgtgtctccagcccaaaggacagcccaatggcatgcttgccacaggaaggtgcgtcagcctcccgaaatactggaaggagctttaccgtgcaggacatgacctcgaccagaccgattgaccgatccccgttcgaccgcactattgcggtgtggaaccacaaaggcggcacgttcaagacgtccgtcgtggcgaacctgggatacctgttcgccgccggtggcaacaaggtgctgctggtcgacatggacccccaggccaatctcgacattgacttcggtatacccgcgggagaacgtgaacggggcatgggattagccgaggcgctacgtgaggggacggcccttcccccaccgcagcatctcagcgaaaaccttcacctggtcagtggcggcgctgctctcaacgagttcaccgaccccgcatccttagcggccatcctcgaccgagtcaccaccgcacgctacgacctgctagctcaggcccttgccccgctggcctgggactatgacctcatcttcatcgactccgggccggcacaaactctgctgtcccagaccatccttggagtagcccgctggctggtagtgcccacccgcaccgataacgcctcaatcactggcctcgtcgacgttcaagacgccatcgacggggttgcctcctgcaaccctgaccttcaactactcggcgttgtcctagccggcgtgggggcccgggccacccggatcgccgcagataaacgccacgccatcgacacagtgctgggggcaggaaccgttttcgatgcggtcatccactactccgagaaggtgtccgtgctcgcacgccagcagggcaagaccgtcgccgagctagccaacgagtaccacaacacccagcccgcctacacctacctagctaaaggccagaacatccccaacgtcgccaaggcagccgtcagcatcgaaactgattatctgaggctggccaccgagatcagcgaccgcatgttcaccagcgacgagcaggagcctgatcatgactgacgatccgactccatccgagcagaacaaccccaccagcgacgacatgcgcttggccgaagaatgggccaacagcggccgcacagtgggagccctgccgcgccgtcaacggcctcagcgacccacaccccgcaccaccagccaaccccctgtctcgtcccctgacacaccggctccgaaaaaaccccagaagacccccaccagccagcctggccgtcaacggatcaacgtcaccgtctacgttgtgcccgaactccatgagcggctgcgctcccgatcggcggcgacgggggtgacggtctcggatctggtggtgcatgcgttagcgttcgtcgccgatcatgcgggggaggcgatcgccgatgatctgcgcgtcgagacgggccccggcatgggggccggactgttcgatgtgaccccatcgcggccagtaggggtcgccaaaacccagctgggggtgcgaatgacccgccacaacaaggatggtttggaccagctgacccggacgagtggagcccgtgaccgcagccatcttgtgtctgtcgccgtgcgcgactatctcgactccaaccctgtaaagaaaggccgacatgtccgctgatgaaactcctgccgcccggggtgggcgacgctttgatacgaccgtcaagcccaggcgccgtcccatgcttatcgccgccggtatcgccatcgtgatagtcggcgcgctcctcatcactcagttgattcgctccgcccaaaccgagcatcgcgtgctggaagtccacgccgatgtggctcgcggcgaggtcatccgtgacaccgatctggtatcggtgactgtcggccaggtcgacaacgtatcaacggttcccgcagaccagctcgactcactggtcggcaaacgcgccacggcagatcttcgagccggatcactcttgcctgctggggctatcggcccggccgatgtcgttccagctccgggcaagtcgctggtcgggctgaagctagccgccggacagatccctatcggagaccttgctgccgggacgaagctgcgcctgatccagacgtcggcacccagcggctcatccaccaccactgatagcagcaccaataccgatggccagtcgtgggaggcaacaatggcgaccggcaccaaaaagaccgagcaggtcaccttgatcaacgccgaagtgaactcgcgtgatgccgcccggatcgcccaactgacgtcacagggccgtatcgccgtagtgaaggatccgatccgatgagcaccattgttttgaccagcgtctcgggagccccaggggtcaccacgacagcgatcgggctgggcagggtctggccacaatcgagcctggtcgtcgaggatgacacccaccacgccatgctggcgggctacctgcgagcctcccagcacgccgaaccgaacctggccgcagtggcgaacctgacgtcgactccaaccaacgcccaaacggtgtgggaatctatcgccagacccctacccaccgatgacccagtcggcgggctgcgacgcaaaggcatcctcggcccgcccacgccgtggtctcgcgcaggcatcgacccccgatggggattcatgctggccctgtggcggcaactggaggaggctggcatcgacaccatcatcgatttgggtcgcctagccacaccactgacctcaacgccacacctgatcgccgcacccatcgtcgaggacgccgacatgatcttggtgatgatcgaggcgacactacgcgacatcgccggcgcccgcacgatggtggagggactcgctgagcagatgaacttggccggcgcctaccgacgtctcggactgcttgtccaccgtggcggccaggcccgcggcgtcgccgagttcaatgacaaggagatcacctcggcgttacgactcccggtcatcggggccattacccacgacccggccggagccgcccaactctccgacggggtcgggcagcggttcgacaagtcacgtctggcccactcactatcaaaggtggcggccagcctcgtcgatgccataaacaagcgccacgctgatgacgaggaggatctgtgatggccagttttgctgataatccgttcgacaagctgcgctcccaggatgcggcaagagcttcggtagagcaggagcctgatgccggattagcgtcggagttgttttcgacgtcgtcggggtgggccagctctcagcaggtgtcccaagctcaaccggtgatgacccgttcggagaacgtggattggccggttgtcgcggagctagccagtacggccactgatgaggttgaggctgagatcagcaggtggagttccactcatgatggggtggcgacgctagacattcgccaggccatcgcggagcctgctattgcctcggcggtgtctacgtatgctgaccgacgccagatcgatgtaggggagacctggcctgatctggtacgccagcgataccgcaaggctgtgtgggatcagctgttcgggatggggcggttgcagccgctgttcgaaatcagcgacgccgaaaacatcatcgtggtgggtaaccatgaggtggttgtcgaccacaacgatggttcccggtcaacgctgccgccggtggccgactcggatgccgagctggaatcccagatcgcccggatggcgaggaatgcgaccccgcggcgagccttcgacgccgatcacaccgatgtgacgatcatgcaccaacagaagttccgtatccacgcgatctcttcggaggtgtcgttgcaaccgtcggtggtcatccgccaacatttgctcacccaaatcagtctgggggacctgtcccagcggggaatgatgccggtggaagtggcccggttcctcgatgaggcggtacaagctggcaagtccatcgtggtcgccggcgagcagggggcaggcaagacgacgtttttacgagcgttgatccacgccattccgatgcgggagcggttcgccacgttggagaccgatcaggagttgttcgctcatctgatgcctggccgggaaaacacgctggtgctgttcgcccgtgatggtaacggcgaggtggatccggcgactggcacccagcacggcgctatcgagatcgcccagctgattcctcctagcctgcgccaggcgttaactagggtcattgtcggtgaggtgcgcggcaatgaggcttcggccatgttccaggctatgcagtcggggactggcactatgagcagtatccactccccgcgagcctctgaggtgccgtcccggctagcccaaatgatttcgatgggcccggtctacgatctggatcaggccatgctgcagatcggtcattcgatcgactacatcgtctttgttcgtaagcgtgacctgcctgatgggagccggctgcgatttgttgagcagatccgttcagtctcgcctggtgattcgacaactcccagtcttggcgaggtgtacacggctgactcgtggacaggccagccgcttacgccactcatgcctggttcggccgccgacgagctgtctcacttcgcccgagacctggattactgcgaggcccactcatgaacactcccgcactaaccagcgccctcatcgtgaccgggttggggctgatcctggccatcgacgggctggtcccggcgccgcctcgacctggtgccccgctgagcccggcccagaggtgggctcggctcacccaccgtcccacaggagcggccgggcgtcgccgggatttgcgttgggggttggctgttctcgtcggcgtcgtgctgtttatgctcaccgggtgggtggctgcgctggcgttgggccccatcattgtgttgttggcccccaccctgctgggggcggccccaccgaccgatattccgctgatggaggcgttggatcggtgggtgcgtcaggtcgctgcggtgctgccacaggggcgagacatcatcacagcggtgcggatctcacggccgcgggccccgaagctgatcgccgggtcggtggatcaactggtgtcccggttggatggccgtatggagccgagggaggcgttccagcggatggccgacgagctggactcggctgaggctgacgcggtgctggcctcactagcgttggcggccactcatccgcggggagcctcgacaacgttgaaggctattgctggcaacatccaacagcggttgaaagtgctgcggcaagtggaggctgagcggtctaagccgcgtaactcggtgcgccagatcacactggtcacgatcgccatgttcggggggctgctcgtgatcggacggtcgtttctggccccgctggcgacccctcccggtcaggtgctggtggccgtggcggtggtcatgtatgtcatcgcactagtgcagatgtatcggatggcgcggccccgtcgacgcacccggatcatggtcaggaggacccgatgaccattactgctttgtccctgctggccggggccatcgtcactgtcggactgctggtcatcgtggcagcgttccgcccagccccaggccctgacctggttgccgctctggaggtggtgtcgggtcgcacctcaagcgtcgccgagaacgtcgaccagacccggatcgggcggataggtcgcagcgtgacccgcacattccatgtgtcggtgtccccggccatgcgggccgcactgcgactccaaggcacgacccccgaagcgttctacggtcgacgcctgatctgcgcactgatcggggcgatcctgccgtggctgctcaacgcggtagccatcgcggtaggggcgaattccccgaacctactcatcccttcggcgctgtgtgtggcgttagctggcgctggatggatgctgccggcagcacggttgaaggctgcggccgggcccaccaacgatgactcgttcgaagcgctgctggtattcatcgatttggtcgtgctggaacggctcgccaacgaaacctccgtcgacgcgctcaccaatgcggcaaacatgtcggactcgccgctattcgtccagatccgtcaagtcctcaaccgtgcctccctggaaaacgtcgacccgtggaacgggctagaccggctagccgaggacatcaaactgcccgaactcaccgatgtggtctccatcgcccgcctccaaaacgaaggcgcctccctcgtcgacagtttccgggcccgagtcgccgagttgcgcgacgcctacctgctgcgcctgcaacaagaatccaccgccatcacccagcggcttggtttgtggacgatcctgcaagccggctcggtcatgctcatcttgctgggggcggccgccctcacactcatcacagccggataaaccgacatcgtgtcgagcccccatatgggccgcgaacctttcataatgatgcctgtaagcaccacaatattgatcacaacctaacaatgaaggagaaatcatgatgaccgatctcgacctggctaaaaaacagatcacctggctggcggcgcacctgcgttcccggatcgttgacgagcgtggcggtggtagctctaccgtggagacactgatttggattggtgtcatcgtggcgctggtgattggtgtgggcgtcggggtgacggcctatatcaggtcgaagatgcctcactgacgacgatgcgtagcaggttcacaactgatcagcgtggcggtggtagcgcgtcggtggggatgctcctgctgatgcctgcgatcatgctgctggcattcggtgggatcgaggtcgggatgtggtgtcacgcccatcagtcgaccatcgcggcagcccaaagcgccgcggaggctcagcgtgtcgtccatccggtcccggggtcggcacaggaggcagcctcgcagatcactagtcatggcggggtgcgtgatacccggatatcggtcagtgatgacggggccactgtcacggtgaccgtctcaggtcgggccccatcgatgctggggctgcatcttccggctgtgtcgtcgacagcgtcgatgcccaaggagcgcctgtcgtgaggcgaagtgagcgcggtggagcaagtctaagcgtcgaggtgctcatgtgggcgccgatcgcgctggtgatcatcgggtttgttgtgggtatcggccggatgtcgatggcccaggacgcggtgaatggcgcggcgggtgctgcggcccgtgcggcgtcgttggagcgtgatggacagtcggctcagtctgcggcgcagcaggcggcgtcggcgaacctgtcgtccggtgggctggcatgtgcgccgagtgtgagcgtggacacgtcagtgtttgcccgtcctgccgggcaggcgggcacggttcacgccacggtcacgtgtgtcacctcgctgggtcttgggttcgggtcccggacggtgcacgcaacggggtctgccccggtagacacctatcgggaaaggagaggctgagatggcccgtgatgagcgtggtggcggctcggtgtcggtgtggatgctgctcatggtgccggtgattctggtcatggccggcctggtttttgacgggtcccgtcagatatcggcaacccaggcggcccaggacgcggcggttgcggcatcccgcgccggaactgatgcggcagcgacaccgcagcttgctggccacgacggggcggccgtagcagtccaagcggcccgccaggcactatctgctgccggggtggacgggtcggtgcaggaggacgggtcgaccatcacggtgaccacgtctcaaagtcggccgacagtgttcctgtcagcgatcggaatcagccaggtaagggggcatgggcaggcccatgctcagcttgtgggaccgggagaacgcccatgacagtgatacgtcgtatcggtgccctggtggcactgctggtggtgatagccggcttaccggccgggctcgtggccgcaggcgccccgctagtaccctcgggcctgtcatgggcccatgtgcggcatctgttggttaccccagacatgaccgggtcggtgctggtgtggctggtcagcctcatcggctggatcgggtgggcatggttcgccctggccgtcgcagccgaagcggtgacgatgctctcagggcagcggctgcactggcacatgcccggccctcgcctagtgcgccgagtggcagccggtcttctcattgccgcgttcgcggccgcaccggcagccacaagcacggctcacgccgccgaggccacccatgtggcggtcgccgcccaggctggaccggcacacgcggcccccgcccaggacagccccgccaccacctctcaggccccggacgcctccaccactccgaaaatctggaagacctacacggtgcgggccaacgactacctgtggaagatcgccgagcactactacggtgacggcgcccaattccgtcgtatcgccgaagcctccggtatcgacccgcactcagagctgaaagtcggccagaaactgatcctgccggttcccgagaacacggccgcagttcattcggttaaagcgggggagtatctgtgggagatcgccgagcactactacggtgacggcgcccagtaccataaaatcgctgaagcttccggtatcgatgcccattccgatctagccgtgggccaaaaactcgtcatccccgggcccctccgccacgacgccacgccgccacaccactcggcgtcgacccacgcgaaggccgccaccccagcccacacgcccacgcgacggcctgcgcctgcccacaaagccacgcccgccccgacgccggccaccccaactactccgacccacacggtgaccccagctccggcctctgccggccactcgaccagcgacgagcacccactccatacggataccgccgcagcggacaaggccagcaacgaggacgccctgtccccaatccaggtgggtttgaccgccagcgtcggactggtgctggtcgccggactgatcaccaccctcaaccgccgctaccggacccggttcacccgccagccccgcggcaaggccatgaccctgcccagcccggacgcccaaactgccgagatagcgctgcgcagcaccggggcgactgacactctgacgatcacctgcctcgaccaggcgctccgcgcgatcggcgcatggtgccaccactgcgggcacccgctgccacccctgctggccgcccgcgtcgatgacgaccggatcgacctgctgctatcccaggcggcccccgaccatcccgaggcggtggagctggccgccgacggatcggtgtggaccctcaccgccgaccggatcgacgacctgctagcccacaccgatgacaaccaagcggctccgtggccgtctctggtcacactgggacgcgacgacgacggcgcccacatcctcatcgacttggaagccgcaggaaccttgcacctgatcgccgatgacgaccaggtcgacgcggccctcgccgcgatcgccgtggaactggccacctgcgactggtccgacgaagtcaacgtcaccctcgtcggccaggtgtgcccgggcctagaagacgcactagagtctccgaccctgacccgcgccaccgacgtggacaccctcctcaccaccctagaagctcgcgccgacgaccagcgacacatcctcaccgaaggaaaccccctcgccgctcaccgagccgaccccgccatctccgacgggttcgacgccgaagtgatcctcctcgacaccgaactcaccgaagaccaccgcaaccgcctcgccagcctcgtcgaggctcttccccgcgtgtcagtcgccgcggtaacaaccagccccaccagcccagacgaatggtccctcaccctgacaggtgacccactagccgccgacctggctcccctcggctggcacatccacccccaaaccctctcccccgacctgtacaaccgcatggttgaactactcgccaactccgccgccgcagactacgaacccgccagctggtggaaccacgacgccgacgacgagcccaccaccgaccccaccaacgaggaagaatctaccccgagcaggcgagcccgcccgaatatccgcctgaccaccctgaccggcggcatcgacctatccagcgtcgacatcgacgacatcatcgacgaagccaaccaggccctcgacaacaccgaccagaccaccaaccaggttcgcgtcgacaccgaccaacccggcaccgacacccccttccccatcgacgacatcgacccgctgagctccgaccacccggtcctatccatcatcggccaccccgacatcacaggtgccactggaaccgttgggcgctccccgtggcgctgccaacagttggccctctacatcgctgagcatccgggagcatcgggggcgactatcgccgatgatttggggctatcagcgtcgacggtgcgctcgattgctacacacctgcgacactggttgggagccgacgatgccggggtggcttacatgccggcggcgacgcgcggctaccggctcgatgagcggatcgtcacagatgtggacctgatcgacgctgctgtggccggggcaggcattaacaccgctgagacggccacactggtggccattttgaagctgggccgcggacgggtcttcgctggggttcctgactcggaacttcgccagttcagggcgtcgatgtaccacgtggaggcccgcatcgtcgatgctgccctccaagtgacagaccgggccctggaagccggagacttggggctggcccggtgggcgctgacccaagggctactggtgtctcccgatcatgaggacctggtcgccggttgtctgcgcaccgaataccaggccggcaacatggacaaggtcgccgagctagttgatcacctgtcggctaccgcacgccgactgggcgtcgacctcaacgaggacaccacccggatcatcgatacggtcacccacgccgacaggagagcatcatgatctcccctgcactcatctccgtcaggaaggtccctatgcaccattatcgtcttggtatcggcactgccctcatcgccgtagcagccctcaccggctgccactcagcaggatcaacgtcggctcccacgccgacaccgagtacccccaccacaacatcgacagcatcggcgagccgcacttctagcccgaagccatcggcgggggccgtcagtgccgccgaagccgaaaaggtctaccgcaccatccacaaaaatgacttcgagttggagaagatgggaggcctagcccccaaccagccggccccactcatgatcaccaactacgcctccggccaggccctcaagagttacacgacgttcaaccacaaggtctacgacctaggcatccactggaagtcagggacctcaaccatcacggccgtacgcgagaagaccggcgatacgactcatcccgaagcggctatcgccctggaatcatgcgaggaccacagctccgtccgaaccgtggaccgcaatggaaaagccagccatggagtcatcatccatctcgatagttggtatgcccgcgacaaggcaggcaccgtcaagatgatcgcacgtaacggagtggaggttccctcatgcgacgtcaagtaatcaccgccggccttctgggcctggctatgaccaccacggcactccccgccctcgccgatagaggcggtatggatggaaaagtggacactgagggtcccgggtacgacgtttcggtagacgtgtggaatcattcccaccgcggcagcacaccccaccacggggactcgggtcatcgggataaaaagcctcaccgcgatgaccatgaagccacagccattgacggaatgtctgagtctgatgcctgggctgttgaccatgggtatggctcagcagacagctatgcgtgccgaatgatgaagtcatacctggacggggcaggatcggcagctctgtccccggcagagcgtaagagccagaccgatgacttcacgaaaaaatgcaaggcagacccgtcgggtaaagctgccccgcctgacccggcccaggtgggccggcacgcggccatgaagatggtcctgcctggggcccgaccagtcattgcccctgacccgagtctgaaccggtggcattcggcggcggtgggccaggccttgtggttgtccgtgaatgacccgactgctaccaagcgtgaatcgttgacgttcatgggtcaggctgtgtctctgacggctcgacgtaacgggctgtcgttcgagatgggtgatggtcacactgtgcattgtgatgccacaaccccgtggtcgccgtctgtggagccaggatccccgtccccgacatgcgggtacacctaccagcaggcagccccggaaggcggttatcaggtcaccgcaatcacgtcgtgggatgtgacctggtcggtactaggacacacgggcacggtccatatcgagaaggccggtgggcagatgcttccggtcggcgagttggagtctgttgttacacggcgatgactcctgatagtccgacgctgtatgaggtgttgggggtgtgccctgatgccactgatgaccagatcaagacggcgtggcgtcgtgccgcgaaagcgacccaccccgatgccggcggcgacccccaggcgttcacggccgcccagcacgcctgggaagtgttgtctgacccggactcccgcgcctcctatgatgccgccctagcgggggaggatgatcccgacgtagaggccccagacaacaccgtcgaccccttgaccccctcgtggtcgtggagtgtctccttcatcgatgccaccccgcggctacgccacacccggcccggcacgctcgccgcgatcgtggtagccgccgccggggtcgaggccgggatcggctggcatgaggcgttggaggccctcgccccctctcccgggttcgtaggttcgtggtggatgacctcggttccgctcgtggccggagtgacatggctcgcggcgatcacggggatccaggccatcatggccgggatcggctggctggggtggggctttatcggtgccgcctgcctgtggggacacccgtgggctgtggccgtattgggagccggatgggtggcctgggtagccgccgcagtgtggtggtggcgccgacggatggcctggcctgcccgcacctgccgggcaggaaacatggtcgacatgcccgaggttgacccgccatggatggagccggtggaactggtagcagaactcatcccctccgtgcgggccatgtggtctcctgacgggcaaacggtggctgtagtagccggtcggcgggtagcaaccttagggatgccgatgcgagggtggcgtggcatcgatatgcggggctggaacccgatcggtgccgacaccgcgtggatcgttgaccagataggcggctggctggccgaccaagacaaaccgctcaccatcgacgggcgcatcttgtacgagacctgggacaggctacagacagttcgtcctcacagctgagaaaaattttgggtccgccctgcatatcggggcctcttcataccttcaaaagtgtgaagggaatacagactcttcgactggaattaaaatggtatatggcgtgtccggtccgcacccagctccacgatgcgccatagaggagccataacttcaccaatcgtatacgatatgagtgtaggtgagcatctaccggtggccgacagtcagatacaagcatgggcggatgaagcagaagctgattatgacctcagcatgcttccgccgtctcgacgtggtcgcccaccggtggggaggggcccgggcactgtggtccctgtgcgcttcgacgcggacactctcaaggcgttgtcacaacgagcccctgacgaaggattgaccacgcgttctgacgcgatccgtgctgcggttaaccagtggctcggcctcggctcgtaaacattatcggcgcgacaaccttactgatgacgctgttggttacgccgtagagcacatcttgtactcgtgggcgctcgacgatgccgatgatcctcgttgctggatgatgattcggtgttgacccagctggcctcctcatggagctagttatcctcatctacgacgatggctatgaactcctgatccacgccatgaaagcccgccctcagtatctgagctacttcgctatctagtgttgttgggcgagttgaactcaacttttctccgacgcaagcgccaataaaaggctgatccatccgaataccaccaaacacggctgaagtgtggaacagattcagcaagacagggtgcggtgctcgggtgcgttggggagatgaggatattcaggcttctggcgggatgtggcttgatgacgtccaggatcaccggttcggttttgaaggtgccttgcattaatgtcgacagggtcgtacgactcgaggactggatcgaccagcccgttgcgtctgaagaacttcatccaccccggtggagctccggccgcgtactggtgcaacggatcattagcatgggtagcgtgagtatgccttcgatcgtggtcagtgctgtcatcatccaagattctgacgggcggcttctcactgtccgtaaacgaggcgccgaggcattcatgctgccaggcggcaagccggagcccggcgaggactcgcgtcaggcagtagtccgggaagtgcacgaagagctcggcgtcgcattgtcttccgacgacctgcgtcgggtgggagtgttcaccacgcgagcagcgaatgaggccggccatcaggtggtggcgacgattttcacccacaccccggttgcggtgagtgagccagctgctgagatcgagcagattcgttggctcgattggaatgtcgacgccctgcctgatgacctggccccgctgctggtcgaggcagtcatcccgtggctgcggcgccgtatccggtcggtcgctgtattcacgggtgcgaaggatggaaccgaccctcattatcgtgtcgaagcaaccgccttgggccggggtctcgcacacgccgggatcaccctggtttatggcggcgggaaggtcgggatgatgggtgctgttgctgatgcggccctcgctgctggcggcgctgtgatcggagtgatgccgcagcacttggtggacggggagatcgcccatcctagtctgactcacctcgaggtagtgcggactatgcatgagcgcaagcagcggatgagtgacctagctgacgcgttcgtcgcgctacccggcggcggcggaacccttgacgagctattcgaagcatggacatggcagcagctcggtgtacacagcaaacccgtggccttgtacgactcgaccttctgggcaccgctgaccgcgctactcaaccacatgaccatcgaaggcttcatccgccctgaggaccgcgcctcgctcgtgatcgccgataccatacatcagctgatggccgatcttgagggatggaccccaccaccaccgaagtggcgctcgtgacatagaacaaatgattctgactatggctcattgacatctgcgcagcggctactagctccattgacttcaaatcgggccttggccgaggctcggttcaggtggcccggaatggatccccacaaattgaatgctcatgatcgaggtgatgaacgcccactctattgtcctacgcccggttgtatccagcgagcaattgaaggtgctgcgcctgttggtcgaccaggccgagccactcactattgacgggaaagtcctgttcgagacctgggacgggctgcaggcagcccgtcctcacagctgagaaaaaattttgggggccgttccgcacatcgcggctctctttcacaccttcaagggtatgaaggaagtacagacaccaaaccgagctgagaactgtgcagtacggtgtgttgagccgcatatcacccatcggatgggccataatgatctctatgaggtctccccgcaagccataccagaagatccgtcgcggcccgaagccacgctgcgaagagcccgtcaggtccttgacgtgttatgtgcctcagtctctgatagatccgatcgacgagatggcgtggcagttggagatttcgaagtccgatctcgtggggtggtcggctttgtgcaccctcaatgtggtgcgcagggaccgaggcgaggaccccataccgatcccggagtatctggacaaggccgtgctcactgcgttgtatcccgatgggttgcccttcgacgaggacaccgaggagccgggcgagaatgccgggcaggaggagcttgcgatgactggatgagcccgaacatggttgaaggccgccccgccaggcgaccttcaatcaatggtttcggttgtcagctgcagccacccttgccaggtgctgtggttcttctccagaggaggagggaccgccatgaagacccagaagatctagaagatccaaaagaaccggtttcggctgttgcttcggtcttcatggtagctgatagcccgcgtcgttggaagtgcgacgacgccgatcctcatcggtatcgcaccctgttccagggtcgagaatgtgaaggattaacaaccatgacaagtcatgagacgccctccctgagggcgtcatgaccgctttaattcaagctctgccgacagctgaactgtctgctggacctggtgctagcagtccagctagaccctctgctgagggcttcatcaagattcatcacgaccttattagtgcgggcgtgtcgggtaacgcgatggcgttgttcgtcgcgttacgtaaccagcccggctgtgatcagtggacccgtcactcgtacctgcggctagcccaatggtgcggctgggatgggctgtcggaggcggcgggctgtaagcgggtgcagcgggccgctgctgagctcgctagcggtggttggctggaatcgcgggtcggccatgatcgtcgcaccgctaagacgctggtgtggcatcggttgaccagccccgacaccgaccgctgggagcaattgccgcggattgtgtgggcgaggatctgccagatcgccggggagacgtcgggagagtgggtgaggcattggctggtgtggcggatgctggccggtcgtactggtgtggctcaggcccctacgtccatcgtggctcggttcctgggctgttcttcgcgccaggtctctcatatccgtggggctctcgttgatgccggtctgctcggctgtgacgaggtctcgggggcggcgagccgggtgtggttcccctcgatggccgaggagtgtgcagcggatcgtgaggtggtcgatggggccgtcgtcgatgctgaggtgggctctggtgaaggtgtcgaggagggcggggaacccctgtcgattttgtccacccacccctgtcgattttgtccacccacccctgtcgattttgtccgccaagtattagacaaaccattagacagtgaattagaccctgggtcgcgtcagcgtgttagctcaccgccgcgcgcgcgcgcggcggccgagccgccgaagccaaagaaacccacaccaccaacgcctgaaccagcagcccccgcttcagacagtcctgtgtcagcgcacgctgatgaggctgccaagttggcgtggcagttcgtggggtggtgtcctcagctggtaggggcaccgaagaaggtacgtggccagctccgtcagctggtcgctgccgagatccgccggaatccgggctggctggatgcgccagcgttggaggttgttgcccagcgggtacgtgctgaaggtgcgctgggggtccagcactgcgagattgtgcgagccgagctgcacggggtgatcgccgaccagaaggccgcccccgcccgccccgacgccctgcacgcgcgggagcccaagtggtgggacgacgtgtactacgaaggaaacacaaccgtgtggacgtacgactctgacgaaaccagtgacgacgacgaggcgtggaaccggtcgcaggtatgtcatgttgctgagcgtgacgacatggctggcgggattgctaccaacctgctggcctcccacgctgatgatccgatggcctggctgactcgccgtcaaaccatgctgatggctcgtttcccccacgcccagaacgaggtcaccgcgatgtgccaaatcgtgcgcaccgccctggaggccgacctggccgccggaacccggtgggaggaccgatgagggcgctacgtcgaaagatcatggtcgtggtggctgtgttcaccgtcgcggtagcggggctggcgttggccaggtcgttgccgtttgccgacaggtctcagccgccgacgaccagaaatgccacccaggcggccgcaaccggtgcgggggctgcggcgggcgcgctcaaccgtctgccagtcaaaggcaaagcagcgatgaccggatacacccggacccaattcgggcaggcgtggaccgatgacaccgaccgggagttgacccgcccctggggtcacaacggatgcgacacccgcgacgatgcccttgcccgcgacctggtcgaggcccacctgaaacccggatcacgatgcgtggtcgtctccgggcgcctccacgacccctacaccgggtccacactcgcctggcggcgcggccggcacacctcgacaacagtccaaatcgaccacgtcgtagccctcgggaacgcctgggtcaccggggcccaacacctcccggcaccgacgcggcgcgctcttgcgaacgacccactgaacctggtggccgtcgacgggcctgccaacgaagctaaacgcgacggggacgcagccacctggctaccgcctaacaaggcctaccggtgcgactacgtggcccgccagatcgcagtcaaaacgaaataccagctatgggtcacccccgcagaaaaaaccgctatggcgcgggtactagaccgctgtccagcccagacacttcctaccggagccccacgatgaccacccattggatccccgaacaactcctagaacccggagtcggagtcatcctcgacaccgaaaccaccgacctggacgggcgcatcatcgaaatatcgatcattgacgcagccaccgggacggtcctgatggaccaactcatcaacccttccagcccagcaccacccactacaccgacacgatccacgaagctgaaaccgaacctcccatccccgtccgaaacatcaacgaactcatcaaccccaccaaccatgcatgaacgcacgatcgcctaccggccagccttcctgcgcgacgtgaagcggctcaaaaacaagcactacaacatgaacacacactcaaatgggcggtaaggtcacgaagtcgacgtggctgcctcacggatggcttcggcgagctcttggggtcgactccacatgggccagtggccggttggcagatccatcgcggtgaagttggtcaggtgcgcgacggcgctgaacatcggattgcctgctgcggccagctcgaggacctggacgctgggaatggagcagcagatcaacgtggttagtacatcatggcgagcgctattggacagcgcgacccgtgcccgggccacttgcgcgggttcaggaaccgcccgtgcccggaaccggtcaaggtgctcgttgctgaggccctctaaactggcctgcttgccgagagtatcgaagtcaggaagtggcagctcagctgtttcctcaggtagatctggtgcgaaggcacctccatcgctcatgggaccggagtccacccagacgatccgatggaccaactctgggtgcctgtctacaactaggctcaccggcccgttcgcgccactgtgtcccaccaggaccgcatcgccgcccatctcgtccaggatggctgagatggcgtcagcttggtcgtcgagcgtgcgcgtagtgcgctgggtgtcctccggatcgagacctggcagcgtcagccccacggctcgactgccagcagtgttcaataactcgactacctcgtcccaagcccaggctccgagccagtaaccaggaacgaggacgataggccgatgctggtcaggtcgcgatgttgaagtcatggagacatagttgcacagtgcgcggacaagggagtggcactatttctggcatgaatttagatctgggtgtccggtgaggcgatcagaacgcctccatgtactgtccgagtgtctaggatgcagcggacacagtcgagcagctggctcacaagtttccaggtgtccttctgcccctatgagggaagtcggctgctctcgcaacctttgagggctgctctggggtcggaaccagttacagatcgttcaagttccgggaactaccgccggtcacgctgattgattcccgggcgatctcgcttctgacgacagtggtcggtgaccgagaggagtcctactctgaccccgctgctgcggtgagtaaatcacgggcgtcccggatccggccacccgtccaagtgccagccagcttgatcggctaggcatcgtcaaggagcgacgatgaggtgatgatgcgatgtgagcgcaccgcgaagtgaggtataaagaagccttcccgggcgcatgcgtcgcccaggaaggccaggttggcccctggacggctgaatggttgggcggatcagactgtagcggagacgtgcagtacctcgtaggcgatggcgttggttgggctctggtctgcatcgtggctactgagttcgacgaggatgacggtccaggtggtgatgtcgacggcggtgacgcgggcgatggtggaatcagtggatgctgcaaggaagtcggcggttatgtcttcgatgcagtgggacggagcagtgctggtgggcaggggcacggtcttgacggtcaggcttcgggcagcagagtaatcggcggttccgttaacaagctggtggacggtccagtcctggatcgggtgccggccgaagtcgcgtacgatagccgagtaaccaagttcgccccagcagaactggcgcatcccctctatgtcgcgccagacgtagaagggcgcgtaggagttctggggtgcgcctttgaccttttcttggatgaggtaggccttgaactccagtccatggtagccgtccatgaggtgtccagtctggatgacgcggtcgcggatgatctgcatgtcatagtcggtgggcagggtgatctgatattgcatggcgtacatcagcggttctccttggtttcgtgggagtaggtcgtgggggtgacgggttcctgccaatcgatggttgacaagtcgtcggcggcttgttggtaggtaaggtggatcattggctgtttgagtgcagcgccatgccagtgtctctggccggcgtcgatccagatggattcgcccttggtcaggtgctggggtgcttgtccttcaatatggaccagggcaacgccgcccgtgacgtagaggccctgtcccttggggtgtgtgtgcctcagcggcaaacgtgacggcgtgggcggcacgcccggcgtcttccgtggcacgatcggccggatccatggcggcgcgcagctgctgttctgcagccaggcgtccaggtcacggcgggcagcatcgacacccagggcagcctcgacggcttcagggctacgacgctggccgggctggttgaccgcagaccactggtgccgggcgtcgtccagatcatggccggcggcgtcgatgagggcggtggtggcttcggcgcagcatcgcctgatccactccgaacgtgacaggccagctgtctcggcggcactgtcaatgcgcgccaggagagatttcatgggcgctcatctgtagcctccagataggcgttgatgtagcgcagagcctgatccgtcatgtcgatggcggctgcctcggcagacgacacaacgggctgtggatgataagaccacccaacatagacggcgaacatcaatttctcgacagctttcatgaggcccccggcggcaaccgcatccgcctcatcatccgaggagaaccacttcaggtctgaacggctgtacatagcccctaggtcctgatgtgggtcgaggtccttggaatgatggaagttcctacacacccatcgccaaagacctcaacatggacaacgctaccttcaccactccctcatctgtgaagagccagtttatgcacggtgttgaaagaggcgtcggtctacgacgaatgcgggttaatggtcttgtggtgtggggcgctgggcgatggcatcgagaacgcgtgagtgggtggcgatccattcggccgcgtcggggttgatgttgcgggcgacggtgtcgatcgctgttacgtagtgggcaagcctgcgaatctcagcttgttggtcagggtgagcgctgatgagaggctcttgatgggaggcgcggttacggacgtggcggatgagctccacgttttcctcgaagtcgcgtcggctacgccccgggtagtgaggcatacctccgttacgtaagtcagtgagagctttccatacggttgcttccaggcgcggggtgagcagaaagcgccagttgtccagtgacagactcgccacgatctgatcaggggtcgcatcgagcctcgcgcgccgcagtcgcttctcggccctgtcgacgttacgcgggaaaccaccgagccgatagctcggggattcccaccaacgccgtatgccagtatcggcgctcaggcgcacgtcaatgaagtttctcaggagtacctcgacatggctgatgtcttccaagaacgctttcgagatgcgggtgttccacacgtaccacgcatcgactggttcgatccggtagcggctgagcctggcgggtgagaaccactcctgcaacgtctcacgactcaccgtgggagcgtggtaagattgatgacgataggcctcgggaaggtcaatgccgcgaaatatcggtatacccccgaggtcattgtcttgcccaggcccctcctcgcatacttgcggggcgtcattggctgccgtcatctcgtctcttcccggtacgtggctgtccatgttcacgggcaggtacggcaatgaggttcccgcacacaaacctctaccaagcatacgctggcaagccgttgcatgagacgacgcctccgcccgccacaccaacggtcaccgccacggccacggtgaccgtgaccgtggcaccgaaacccaagccaaagcccaaggccaagccaaaggtaaaacccaaaccgaagcccaaggcccattcatgatcgcagtgcccgatacaaggtggagcggcccacaccaagctgggccgccaccttcgttttcgggacaccctcggcaacgaggcggcgagcgcgggcaagctggccctcgctcaatgccggtttccggcctcgatagcggccctgcttcttcgccaccgcgatcccctcggcctgtcgttcatggatcaacgcccgctcgaactcggccaaggcacccagcagatgcaacatgagctggctcaccggatcagcggaccccggcccatagacctgacccccaaggagccccgatctgcgccgaggcccgcaccgtccaccacatcagccccgacgatctcgcgacagcccccacgttcacccaggtgcggccccggctggaggatgtggtggccgatcgggtggtcatggcctggaacgcctcgttcgaccgggagcgaatcgaagcggaatatgccctagcgggcctggatgctccggcgtggccgtggtgctgcctgatgcgtttagaggcgtccgtgatggggtgccagtggcgtcgactagacggaccccaccggggccttggtgatgtgatcgccgcccgccgccggcttatagcgttacaagagatgcgggtcgccaggatgacgagtgaggggcaataaccaccaccccgaaaggacatagatcatgagtgagattcatttgacgggtgttcgcagcggttagagggcagtggcttcgtcgatggtggtgcgggggagttggtagaagcgggcgagggcgtcggcgtcgaggtgggggtccatggtggaggcggcgatgatggtcccgtagagggtccacgtggtttcgttgtcggtggggttgtcggcccagtgttggcggagttcggagaaggggtggtggttgaggaggaggcaggctcccatggagtagtcctcgatttcgtcggcggtgaggcggttgatgtggttgatgtcggcgaggacggcatcgaaggtgtcggcttcggtttcggttggtgcgtccatgtcaatgttcatgggggaagccctagggcgctggtgggtgttgtgggggcttgacacggatgtggtgggtatcgtgggggtgcaacttctgtgggagttgttggctttactgagagatcccccggctgtggtggctgggggatcgttgtatgtgggctggggtttcccctcgcaacacgccgatacgcatatatacagatacatcgatgtacatgtgtaatgatgtatttatgcgtagtatttctattgttaacaccaagggtggggttgggaagacgaccacggcggtctacctagcaacggccttagccgctcagtaccgagtcatcttgcttgacgccgacccgcaaggatcggcgacgtcatgggctaccgacgctttcgaagccggtgaccagttggacttcgaggtccgcccggctaatgcccccattgtcaggcgctgccgtgacatcgacgccgacctcgtcatcatcgacactccccctggtgactctcagacgattaccgcagctctcgacgtcgccgatgtggtcatcatcccgaccgagtcgggggacctggacatggatcgagcgctaatgacctaccaggtggcccacggcacgcgccgggccttgctcttcaacaaagccgattggaccaggcaataccgtgatgcccacgacggagccgccgccgtagagggtctagacgttctcgatgcgcaagttcatcggcgggtcgcctatcggcaagccatcgggacccgaccagacgacctcggagagttcgcccaggttgctgcccagatcaaggagatgctgaagtgagtaagaaccgcaaacccaccgccgcagacaaggccagccgctacagcggccagatggcggccagccagggggccagtgttgccgaaaccttccagtcagccaagaccccgattaccccgttcaacgtcaaactgcctaccgctacccatacggcgttaaaaatgaaggccgttgccgaccacaccaccatgaacgaccttttgcgcaaggccctggaacacacctacggcttcccttacgacccctaccagtgaaggacgagacaccacgccatgacctgggagcggctttagctggtggtggtgggctgggattgtaagggtgttgcggggttcgtgttggtggtgggtgttacaggtgtctagcagggtaggttggtgtacatgatgataggtgtatgagtatctatgtatctttctatcggggcttatcggtagatgtcgcggcggtgaccgatggacagggcaaggatgatgaggcggtcatcgttgagtgtgcatatgaggcgataatcaccgatccggtagcgccacagtccagaaagatcaccggtgaggggcttgccgtggcggcggggatcgtcggtgttgtcgatgtttttcgtgatccagccgtgaatgagtttttgggtgtagcggtctagctttttgaattctttatcgaaccggctagtggtttcgatctgccaagtcataggtcacactcgtcccatagctcgctgatgggacgagactggtagttgtcgttggcgtagtcggtgagtgcctcacgggctacttgcagatcgaactcgtcggcgatgcggtcgaagagggcttgcttgaaagcctcactcagggactgcgagtgtaggtgggcgtaggaatcagctaagcggcgctcatggtcggttaaacggatggaaaaactcatgatgtcacctcgtaagacgtctatagtacaatgtactacacgagggtgggggagtccactcctcgaccccgcgtagtacgtatcaggggtatggagattcaggcggcgggaacggttcccctgtcggggggtgaggggcgaccggggtgagccggtcgccccgtggggctcactgtgcggtgagctgcaacgcctcggcaatcgcgtgggaggtcttcgcgacgtgctcggcggcagcttcaatcgcggcgccgtctgcttccttcgcccagccggcaacgtacccggctgaaatgggtgcagagtccaacttcccctcaagggcaggcccgtcatgctgtcagcagatctgccagttgtgggtgctggtgtcgtagcagacgccggtgtcggtgtcgtcggtgcggttggtggcccagccggtggtggagtcgtcgagggtgatgtggtggaggtcgggttgagtgttgagccagtgagtcccctcagcttggggtaggccatcgaggatggctagcaggtgggagatggtggctgtgcgggtgagcgtgaggatggttttggatgtgttggtggtgtcgatggtgaagccgtagtcggcgagtgcagcggtcacatcggtgggctggtcggtgtagatgcggttggtgagtacggagcagtcggggccttcgccgtagatgctgatctccacgctggtgccgtggtagtgggcttcgtaggtttcgtcgatcatccatgttgtggcccagtcggcgtcgacgagggtgtagggggttcgggtagtgggaagtccgatgtagggcttggtcaccatgttgacgtgtgcggtgtacttcatcgtcgttgattcctttcccgatctctcgttctgcttataaatatatagcccgatagacagactgtcaagagtactggataaataatctaatacgcttgacttgaaggatagttgagagaataactcacatgtgagatgccatcagcggcgcagaatgccccctcctggccccttgccgccccttcgggtggccaaggctgtaaaccgcagcgatacaggcttacaggtgccccgaaggggcgcctatccacgcgctcacccgacgccgaaggcgtcggcaggccctgcccgaagggcagcggctgcccccc

SEQ ID NO: 188 - DNA, 53136 bp, Propionibacterium acnes
  source 1..53136: mol_type = genomic DNA
ggtgagcgcgtggataggcgccccttcggggcacctgtaagcctgtattgctgcggtttacagccttggccacccaaaggggcggcaaggggccaggagggggcattctgcgccgctgatggcatctcacatgtgagttattctctcaactatcctttaagtcaagcgtattagattatttatccagtactcttgacagtctgtctatcgggctatatatttataagcagaacgagagaccgggaaaggaatcaacgatgaagtacaccgcacacgtcaacatggtgaccaagccctacatcggacttcccactacccgaaccccctacaccctcgtcgacgccgactgggccacaacatggatgatcgacgaaacctacgaagcccactaccacggcaccagcgtggagatcagcatctacggcgaaggccccaactgctccgtactcaccaaccgcatctacaccgaccagcccaccgatgtgaccgctgcactcgccaactacggcttcaccatcgacaccaccaacacatccaaaaccatcctcacgctcacccgcacagccaccatctcccacctgctagccatcctcgatggcctaccccaagctgaggggactcactggctcaacactcaacccgacctccaccacatcaccctcgacgactccaccaccggctgggccaccaaccgcaccgacgacaccgacaccggcgtctgctacgacaccagcacccacaactggcagatctgctgacagcatgacgggcctgcccttgaagggttggactctgcacccatttcagccgggtacgttgccggctgggcgaaggaagcagacggcgccgcgattgaagctgccgccgagcacgtcgcgaagacctcccacgcgattgccgaggcgttgcagctcaccgcacagtgagccccacggggcgaccggctcaccccggtcgcccctcaccccccgacaggggaaccgttcccgccgcctgaatctccatacccctgatacgtactacgcggggtcgaggagtggactcccccgccctgagcagtacactgtactacacagtcattgaggatagaggtgacgtcatgagtttttcgatccgtttaaccgaccatgagcgccgcttagcggactcctacgcccgcctacactcacaatccctgagcgaggctttcaagcaagccctcttcgaccgcatcgccgacgagttcgaccttcagatagcacacgacgcactcaccgactacgccaacgacaactaccagtctcgtcccatcagcgagctatgggacgagtgtgacctatgagctggcagatcgaaaccactagccggttcgataaagaattcaaaaagctagaccgctacactcaaaaactcattcacggctggatcacgaaaaacatcgacaacaccgacgatccccgccgccacggcaagcccctcaccggtgatctttccggactgtggcgctaccgcatcggcgactaccgcctcatatgcacactcaacgataaccgcctcatcatcctcgccctgtccatcggtcaccgccgcgacatctaccgataagcccacaccacccccaaccaccaccaacccggtgcataaatacacatacagctatacacctatcatcatgtgcaccaacctaccctgctagacacctgtaacacccaccaccaccagctaaaaccgctcccaggtcatggcgtggtgtctcgtccttcactggtaggggtcgtaggggaagccgtaagtgtgttccagggccttgcgcaaaaggtcgttcatagttgtgtgttcggcgacggccctcatcttcagcgccgtgtgggtagcggtaggtagcttgacgttgaacgcggtgaggggggtcttggccgactggaaagtttcggcaacactggccccctggcttgccgccatccgaccggtgtaacggctggccttgtctgcggcggtgggtttgcggttcttactcacttcagcatctcctggatctgggcagcaacctgggcgaactctcctagatctgttggccgggtcccgatggcttgccgataggcgacccgccgatgaacttccgcgtcgagaatgtcaaggccctctacggcggcggccccgtcgtgggcgtcacggtattgcctggtccaatcggctttgttgaagagcaaggcccggcgcgtgccgtgggccacctggtaggtcatcaaggcccgatccatgtccaggtcccccgactcggtcgggataatgaccacatcggcgacgtcgagggctgcggtaaccgtctgagagtcaccggggggagtgtcgatgatgacgaggtcggcgtcgatgtcacggcagcgcctgacaatgggggcattagccgggcggacctcgaagtccaactggtcaccggcttcgaaagcgtcggtagcccatgacgtcgccgatccttgcgggtcggcatccaacaagacgacccgatcctggcaagacagggccgtggccaggtagaccgccgtggtcgttttcccgaccccgcccttagtgttgacgatagaaataatacgcaccataaatacatcattacacatgtgcatctatgcatcagtacacatatgtaccggcgtgtcgcggcaggaaaaccacccacatacaacgatcccccagccaccaccaactccgagatcttatgaagagacaactcccacaggagctacacccctcacaggagcccaccagatccgtgtcaagcccccacaccccctaccagcgccctaggcttcccccatgaacattgacatggacgcaccaaccgaaaccgaagccgacaccttcgatgccgtcctcgccgacattaaccacatcaaccgcctcaccgccgacgaaatcgagtgctactccatgggagcctgtctcctcctcctcaaccaccaccccttctccgaactccgccaacactgggccgacaaccccaccgacaacgaaaccacgtggaccctctacggggccatcatcgccgcctccaccctggacccccacctcagcatcgacgccctggcccgcctctaccagcttcccctcgacctcgtgacccaagccctcaccgtctaagcgccgataagcgggggagaggtagcgcactatcggctaaggaaccccacaaacaccaaacccttgtcactgggaagggtttggtgttatgctggtctcacaactcaacagaggaggtgagacatgggaaatgagtaccagaagtcgctcaaagtcctgttcaagaaactggaatctgagcaaggagcccgcatcgagacccggcgcaaaggatggatgatctacccgccggatacgtcacgaccagcggtcatgatccacaagactccatcagatcgcagagcatgggccaacatgctttccgaactgagacgctcaggattcaccgtctaactcagtgaagggggctggagctccagccccctttcaaccacctcccccggacaccacacaagaaaaggagaacatgatgtggcacgttcggttgtcgcttcgcgcaatcagcgaggacatgctgttcgacgccctggacaccctcgaccccttatccccggtggccacactgggccccgatgagcacaccggatcattggcggtgttcgtcgaggctgactcactgacagacgccatcgagactgcccgcacagccatcaccaacgcatgcaacaccgccaccataaccggcgtagaagcccgccccgaagacgaatgcttcgcagacgttgaccggcccctgttcccgccagtggtcggatacaccgaaatcgctgaaaccgcaggactctcacgtcagcgcatccgccagctcgcaggcaccgccgggttcccggcccctgtcatcgaaaccgcccaggggccgctgttccccaaagccgcagccgagcagtggacacgaacacgccagcccaaagcaggccgcccaaaactccagaccaccacctcataacacatcccgtgtgctgaacctgttggccggcccagcacacacccccaggggccgggcccagcccggccccgccccacacccagccgctccctgttgccgccgtggcgaaacgatcaggcgagccacgaccatcaccaagctgaacggagagcgagcatgagcaccacccctgccgggttcgatgtcgacgctctggccgagtgggctgagagtgacgaggcaacccagaccccgcaaaccagcccggtgttccacggcaaggacgccgcgcgcgccagccgcgcattcctcggccgaggacggccggcactcggctcagaccgcgctaccggccaggggcggtcacctcgccgtcaggtccgcctcgacgcacgcaccaacgcccgactcgacgcctacgcagcccagaccgtcaccagcgcctcccaggtcatccgcgacgccctcgacacctatctgcctgcctgatccaaccccaatccactcgggcgcctgtcagtgctggtgttctaggcggtggctggcatcgacggcatctgctgcaacgctataagcctctgcctggctgctatcacgtcgccgaggccccggtgtggcccgtctagtcgccgccatcggcagcccatcatggccgcttctaaacgcatcaggcagcaccacggccacgccggagcatccagccctgcgaggccatactcggcttcgatacgtccctgatcaaagggggcgttccaggccatgacgacccgatcggccaccacatcctccagccggggccacaccggtgtcctggcctccagtgtcgcgacactgtcgatttcggtacgtgcaatgcggcggcggtttgacggatcgacatcccagactcccgcgcgtcccagatcgccatgtggagagtatttgcctccagtgcggccgccacacttgcacgctctcgcgcacgctcgaatgcccgcctagtgctctcaaatgtcgtcacgacgcctccccctgaaaatactcagggtgtcccacggtgggacaccctgagtatttcataccccaactcgcctcaccacacgtcgacctcgacaccgatcaagcgacccgtatcagcgacattgccgtaccgctgccccgcctggtcctccagccacgacaacgcatcccgaaacagcccgacgtcttccaaagctaaaccacagtcgtagccgcccttgtcccccaaccgcacaatctggcgctcccggtggcctccctcgtcgacctcgatccacagtttcgcgtgcatccgctggcctcggccctctgacaggatctcggtgagcaggtcggacgcctgccctcgcgcatcctcgttactgcgggggaattggagtatgtgggaggaacgatgatgggggaggttggtgacctcatggcgcagcaggttgcgcttgtgcatctgctggtcgagacggtcgggctgacctgttgacggggttgagccgtggcgccgcttcctcggcggggtctcgatccgttgctcttccggcggttcggcgtcaggttgtggtgcgcgatctcccctaggacgggggggctcgccacctatatccgagggacgatgagacggccttccacgcttgctgcgcactttcgcagcccgccccttgcggtcacgtcgacgcggcggcggagtgacgtcctcaccgcgcgctagctgcgtcaacgccgccaccaggttggtgcccggtttcagccctttcagcacgtagcgcagcaggcgggggtctcgcttgattcgtcgagcgatctcattctggctccacccctcggccaccagggtgcgcagcagatcctgggcccggctgtcacgctcagccacggctcaccccctcagggatgcctgcctgctcggcctgctctgacagggctgctcgttccgatccggtctgcggcgcttccagagggccaggcaagacacccttgacacgcagccgaccatccttgccatcgtcgccgcccccctgggccacagagagcgcccaggtaggcacgctgctggtgtagatggcgtcgccgtgaatggccagcagacagcgagttctcaacgctcctcccctggttgtggcgtttttcccggtggcggggtcagcgatgggtgtgttgagggtgcgcacgcgcgacagagcccagatacgggcagcgatctcaggatgccaggtgtcaggatcaggacggcgacgggcagtctcgtactggtaggcgatgacgtcaccatggttgttgcggatgacctcgaaaccttcgatgtcggagggaatgtcctcagcgtcgtagacaacagtcgtggtgacggggttggaggccgacatttgcccgatggtcacgcgcagcatgttcttcaaagcggaggtgagaagcgcggtagcagtggggctcttgtctgcccaacgactctcagccatcccgatcatgtcttggatggttttgacccatcctcgaatggggtcgaccttggtcagtttgatccctgccaggaactcgatgggccgactaatgggcccgtcaggcccgaactcggtatcccacccttcgtcgatcgcaagcttcaactcggcggcatcgacccacgtctcgtacgtggcaccaggcacattgggccaaaaccatcccgctcgaccctgggtacgtttgaccggaaacaaaccgatgccatcccaccaggacggcacggtgaaacggacgtggtaacgggccggatgccaaggatcgtcagtaaacaggtcgcgggcttcggtggcgccgagcagagtcgctggtgcggcaccgatctctccggtcactgatccggcatacatgaatcggccgtcgatgtacacgaaattagggatagaaccggcgggagcagtaggccgccagccctcttcccggtcaccagagtcaccggtatcaacacacagctcgtaacggtgctgaggcgatgtgcgctggatgagtacacccaattcagggtccatcggctccatgccataagactcaggagtccgcagcttccaaaggttaatgccctcagccccagggcgatccatgagagcccaatcgcggtcaatcctggtagcgataatgtcagtcagctcccgccatgcccagcgagcctgaaccggagtgagaacctggccaggaaaccactcatcagccacaaggacatccacgttgcggtcggtctccttatgagtaaaccggcctcgcgcaggccgacccgccagcatgaacaagccccgcacgtgccaatccttgatgaactcgcgagtgtgggcaggagtatcaggcagtagccacgactgaggctgatcagggatatcaccacagacgatcagacgtcgagcgtgatggtgcagcgcagtcgtcaacaaatccgacagagtggcgcgcttagtgcgccgaccccccagcaccggcaaaatctcgttcccggccgcgtcaaccccccgagcagtgtcaatatccagccacaccgtcacaggatcaggaggccgatgaggggcaggccgacgccgctcctgaccatcactcacgacttcctcctctgagccagagaacggccagcatcaagggcattgacacgctcgcgccgctcctcacgcaactgatagacccgaccacgggacacccccgcaacctcagcaatcgtggcggccgataaatgcccaatggatgcagcatcgacaagaacctcacgccacgccaaatcaatcgctcccagctgagctagagcttcctcacggcggcgggtggcgtcggccaccacgcaggcccaccctgcagggtggatagtctccacgacgattcggccatgacggatgggtccccatgcatcagcgggtacctgccagccatgatcagccgcggactcggtgattttgagtcgtcgctcaggtgcgcgggtgcggacagtagcgtcggtggtccaggtttggactggcacccacgccccttctcgggcgcgttcgatgacgcacgtggcgccatcgtcggtaaccgtgatgaccagacggtagtccttcccgtctggagtggttcgatagctgggcatgtagccctccccccatatgtcaatctaactagacatattctctagcctatttgacacattgtcaaggacaatagacctttcgtgtgaatccaccccgtcaaatgcacactcacgcctcatggcccgccgtgacgccttaacgaacccgaaccgctcataaaaccgctccgcagcatccccagaggatttgagttccaaggtgaaaccttgctcgtcagcccattggcagacgtgggcgagaacctgtgatccgtagccctgatttcggggggcggcatgcacgcacatcagcatgtgaccatgacggcgggtcggcgggctgacataagccccaccacgccagtccggtgtgatctgccaacttcgccatgccgcagcgcgccagcggcgggcctcggtagccaccatgatcaccatgatgatggacagggctacgacgccgactatggtcagctcactccagccaggccagttcccggagatgatccagcctcccagcgcccagatgatcatggcttccacgcccgccgcaatcgggacgagtggggcagtacggatgcggcctgccatgatttcggtgatctcgctgcgatgccacgaccaagagaactcccacgaggcacgaattaggctcatgcgtgaacggcttcctcggcttcgctttgccatagcttctctagacggcgctcggctagctcgtcggggcacggcgacagcctgccgcactcggagcagaccccgaagtggcgcgagagagtgatgaccggctcatcgggggcatgcaccgattcaacgaccgggtgttgctcatcggtgagtcctgaggcgtgaccaatctcggctagacggaggtgaaccataccgtcgtagtagtcgacgccctcaacgtggaacgggtaggagccggccgaggtgtggcctgcaaccagatccccgacttccagctgactggcggtcatggaccgcaccggtggcagcggggtccgggtcgcgttgatcctcatggtcactccttgcttctgcgccttcatctatgaaggtgtcataaccggggtcgatgtgcggagccacagtcactttttcagcagatccatcatctgggacccaccccctcccaaatgtgttaaccgtgatttacactttaaggcatgatcgaacacacaccgacacccgccgcacctcgcgtggccatcatttcccctagcgggccaccacggttctcggccgagcctcccagcgccgcgctgcgacgccatggtcggacccgcatgaggtcccttcccctatcccctcacattcgcgcctgggtctccaccagcggtcgtaaacccaatcccatagccaccgccctgatctggatgcataccggagccctgctgccggtgtgggacaccgccgttttgactgggcctgccctcggcagacgtgtgcgccctctcagcagtgacgccgaactgacctctcggcggtggctcgaccaggttgccgaccatcccggctttctcgacacccttatcgaggccgcccacatcaccgagggatggcatcacgcaacacctccgcacattcaggccccttatcggacccttcatcagtgaacggaggtacaacgacatgaccagtgacattgaatggggccacagccctgatggccgcgccgaagccttgctgtaccgggcttgggccaagatgctcgtgcgcgagtccaggctgccctggcgtatcgtcgccgctctcgccggggtctcccccacctccatgcaccggcttctgttcggccgcaatggccgacccgtggcatggatcggctccgatgatgcccgcgccctgggggccaccaacatcgaagacctcacctcagcggccaccgaccggataccggcccgcgagtcccgcgaattgctggtagccctgcacacccttggctggaccaacgcgcacctgagccgctggctcaccagctccgacctcgccctggccgacactcccaaggctctctacgtcactcgactatccgcagcccgtatccaagccacctacgacatgatcgtcagccagcccgtccgccgcaccggccacgccagcacaccgcctgtctcgtccccgcaccccgctgccttatcccagcccggggtcgccgccaccaccgagatagtccagcccgccctgttcgagctggccgactacgcatgagaggttgcacacatggttgaatcgaaggacccgaccagccaccaggaggcccccttgcgtctatatcgcgctgctctcgccgacatcgacatccaggtcaccgtccgtatctggagcaccgccgatcgtggctgggtctgggcccccctcgacacctggacccctgacccgacgccgaccacaccagcccagttgtccgacgagcttcaccaccacggatgggtcaccgccgaggcccccaccaccctcaccgaggtggatgtcacccccgagaactggcaggacctcgtcgaccacgccctcgctgcccgcaaccaccaagccaaccagctgcgcgtcgccgagaacatcctcaccgacatcctcggcgacgccgccgacgccggcctgtctgtcaccgctctcgcccgcacgaccggactatcccgagtcgccgtctacaaacgcagcgccaaaaccatcgactccatgagacacgccacccaggccggcggaatcctcaccccctcctgtctcacccacgctgagagaacagcgctcggcctgcccgacgagtaacccccatctcggaagcgccacgggcaagaaggcaaagcggcagtgtcttcgaaccggtcacgaacacgcgaccctcgacagcacttaggccaagtttcctaactaagacggaccaatgggaagcatttttcccacagcaccgcacatcggccggggctagggacccttcaccagtgaaggcaccctagaaggaagacacaccatgactgctgtagccctaccggacatcgctgatctggaccgcgccgtcgacgacctcaccgatgctcttatcgctaccaccgatgccgctgagactagtactgacggcagttggtacatcgaaagcaccgtcgaggagttacgcgccgccttggctgaggttgcatcccgtggccgcgcagtaggggtcccagcatcattgctggccggcacatcgcgggcatggcaggccgggcaagtcgaactgatccaaatctcagggcagatcaccgacaacctcatcagctggctggccatccaccccgagaaggcagcatgaccgcaaacacaggaagaaacaacgcaggcgaagaaatcctcgtcttcctcgttgtcggcatcggagggatagccctactgaacaagatggtccccaagatcattggcaatctcggagcatggcttcgcgcccacggattgctcgacgctcccgggcagggcttgtttgatcttggttcgttgggatcagttagtgctgcccacctgatgatcgccgttggtgtgctgatcattgtgggcgcagtgggggcacggttcactggtcgcagggatcagtcgaggatgtaaacgatggggcaaaccgaggtattggtcacagaatcgttgtggcgcggccgcgggtgagatgggggcggcaagcagttgccagttaaggcctgtttagttgacttaagcacactatagtgggtggtatgaatctcaaggagtgggcaggagtgcgcgggatttcgtatcagaccgcgctgcggtggtatcaccgtgggcttatgcctgttcccgtgcatcgagtgggaaggctcgtgcttgttgattgtgacgagcatgggttgccgttcgagggatcgacctttgagccgacgaaaacgatcatttatgctcgggtgtcctcggcggatcagaaatccgatcttgataggcagatcgctcgagtcatgacatgggcgagcgcgaaggaattgtcggttgatggtgttgtcaccgaggttggttccggtctcgatgggcatcggaagaagttcgagaaattgttgaaggatggttctgtcaggacgattcttgtggaacatcgcgatcgattctgccgattcgggtcggaatatattgaagcggcgctctcggcacagaatcgtcgtctccttgtcgttgacgacaaggagatcgaagacgatcttgtgcaggatatgacagatgtgctcacgtccatgtgtgcgagattgtacggaaagagatcggcgaaacatcgcgcccgaaaggccgtggaaactgtcatgatcactgacggtgaagaatccgttaaggatgatcacgcatgatcactgagcccgcggccccgaaactgggcaggaatgatccagatgttgttgtccggtcctacaagtttgcgttgaaacccacgacgtcgcaggaacggaaattgcgtcagcatacgggtgcagcaaggtttgtctacaattatctcatttcccagtggcgcgacgacattcacactcgtatcgaagaaaaagaacgtggtgttcctgaggatggattgacgccgttcacgtttaagttgtctgcctatgatatgcgcaattactggaatcgcaccaagggtgagtgtgctccgtggtggccagaagtgtcgaaggagatcggcaatgatgcggcacgtcgtgcccatgattccattgagaactggcatgactccaggggcgggaagcgcaagggtagaagagtgggcttcccccggttccacaagcgcggatgccatgaatcgtgtacgttctcgaccgggacgatccgtgtcaatcctgatcgtcactcggtggcactgccccgaatcggaaccataaagactcgcgaaaatacgcgcgaattgcaacgtaaaatcgccaaaggtacggcaaggatcactcaggccacgatctctcgcgggttcaattattggcacgtctccttcaccgtgtatgaaaagaaacacattcccgaaacccacgcacattccggctctgttgccggggtggacatgggtgtgggagatcacgtcatcgttgcggcaaccccaaacggtgatgaaatcatgcgtaggggattgccgcaatcggtcaagaaggatgaagcgcgagtgcggcaccttcagcgcaaactgtcgcgtaagcatggcccggataagaggacgaaaaccacgccctcgaatcggtggattcgcgcgaacaaccaggttcgcaagtatcgcaataccatggcgaacgtacgtcgcgatcttgccgcgaaggctgctcatgggttggcgacgaattatgagaccgtcgtcatcgaggacttgaacgttcaagccatgatgacgcgcggaggcgcacacaaacgtggtctgaatcgtgcgatagcgcaggcctcgtttgctgatcttcgacggagaatcacctacaaaacgaggtggaatggcggtagaaccgtcattgccgatcggtggttcccatcatcgaaaacgtgttcggaatgtggagaagtgaaatccaagctctccttgtccgagcgtgaatacatctgccatcgttgtggtgttgtcgtggacagagacctcaatgctgcaacgaatctggcgaaattagcggcaccgaaatccggtgtcgattttcacggaaccgggagttcgccggggatgggacgtggaggctcggggaagaccagctcaccctcgggtgagctggcaccggccggtgaagcgtcaatggcccgaaaggacctgagcggccgcaaggccggcacgagataacctgaccatcagagtcagttctcatgcaacggtcagtgggcgatggctaggccgatgagggcgccgctgcacaggctgggtgcccaggggaggaatcgggtggtgtggtgtcggaaccgatcgattagggcatatagggcgatcagggtgaggccggctatgaccgtggcgtggatcgtgtcgatgccggttgctgcgaccggggctgcccacagtggtgtgatgcgcacgtcggagaagccgaagccgcctcgggagatgagccaggcgatcatccacgctgcgaagatgatggtggtagcgatgacagcacgtgttgccgcagtctggtccgagagggcggtaacggctacagccccgatccatccggcccatccggtccacgctagggctgccggtatccatgtggtgatggcgtcaatgacggcaacccatgccccgatggtggctagcagggcccacgtcggccacgtgggtgctggggcccacattgtggcggcgatcatggtgaccgcagccgcggcacagaccgcgatcaagcttcggagactgtaggtgtcgcggtaggcgattttgtcgggggtggcggtggccggttcgggcaggatgcgagtgagggagggccatcctgcggtcgcaatggtcacgacggcggcgatccacacgatctggtgcatgggtctcatcatggcccaatatcgatgggtgtgggtggccgacatggggtcagtcgtcgagaggtttgcgggcggttgtggcttcttgggtgccgaggatgagggtgccggagtcgtcgccggctgattcccagtcgacgatgacctggtcgccgtcaacgctggattcggcgatggtcacccattgcccgtccatgtcgatgagcatcccggcggccagctctgtggcggcaaccgggtggggtgggctgtagaggaggtcgatgtcgcgggcagggtcgtcgggttcttcggttacctcaggtggggtcgatctggctgtctcggtgtcgtcggccaggtcggctcccaggatgcgttcccattcggggctggttttcttgcccgctgaggccatcgtctcgtcgatctgttcgtcagtgggccacacaaatttctttttggtccaggtcgtggtgtcgggtcgcagctgatccagcagttccaggtcttgcggggagtgggccttgcgggggtcgggggtgtagaagaattggacttccttgggggctgattcgccggataggtaggtgcctcggccgcgtttgccgaacgggatgcccacgccgacgtgttcggagccgaacatcatgcgggctccgtcagcggacaggggtccggtggcggcacgcccggagaagttgtctcggatttcgccacccaggaactcggcgtcggggcgttgggtccccagatcgacgtggatacggcaggcggctgccatgcgcagcagggagccgatccagccgaaaacggggcattctccgggcatcccagagaccttgatcgttgaccaccagtttttcgcgttgccgtagaactggcggtactcgtcgatgaggaccagcacgcgggtgaagtcggtctcgcgggccccttcttcttcgatgcggcggtagcggtcctccatgagagaccacagccagtggatgagggcgacctggtcggggacggtagtggcgaccatctcgatgttgggccactcccgcaggcccaggtactcgatgcgtttagggtcgatgacgaagacgcgccagttgcggcgggcaccctcgacggcgtcgccgatcatggacaccgtttttccggtacgggtgcggccggccttgagctggtgggccatgacaccggagatgtcccagaaacaggtgttgccgtcctcgtcgacggcctgggggattttctcccagtctggggagtctgggcccggaagggccacgggtcggggcaccatcgagggcagggggtggcggcgggtgacggtgatggtgtcgtgttccaggtcgaagtcgctgcgccactggccgagcatcatcgccgaggtcaccgcggccaggcgcaattggatgttcgggctggacaaatgggcgccacgttggtggtgaatggtgaagccgtccaggttcccccgatcggttttccaggaatcgacggtgaccgccgacccatagatctgagtggctacttctttagcccgttccttgtctcggtccagatcggttttgtcagggtcaggggtcggggcgcggtattgcaggacgaaccggccggccgggatcgttgcggatgtcaccgtgaactctgccggcgaccaggcagccgcggccgcctgggtgagggccattggcatggtctcgacggcagcctcctcgggggggatggtgagggtcaggcgtcgcggatgcgtcttcttgcgattccatgtgactttctgcctcaccggcaccttcgccgccgactgaatggctaggcgagctgattcggcagtttcggtacgccggccagcgcgtagcgcccgtcgtgcgtgaaggctgcccaccacagcacagcccatacacggcagccaccagcgcggatcagcggctgctgcatagcccccggtagctagtaccgcacctgaccagccggccgcgatacttttccacgccggtttcgcgccaccaggaccagcgttatggacggtctgcttcgaggctgcggagggacgagacagcggagtgctggtcatgccgcggcctccttgtggcaggtcatttcacaggcatgccggccagcgatgatgccgtggcgcaccgccccggtagccgcatagaccgcgcacaactcaaacacggggcacccatcgcaggccgccgggttcatgctttctttgtcccacgatggtgggtcatcggtgcacggcacggccaggccatcctgttgagcggcgctgatagcggtgaataggcgcagctgggcgcgaacttggtctggggtcaggttgacggtgcgggctacacgcatggggttccttcctcttcaccagtgaaggttccctagacccggccgatgtgcggagggatttcagtgttttatcgaggtgaccagccatccggtctgcgctgcgggttcaggtaccagggtcagatgcagcatggtgtggtcggctaggggcacggcgaccaggggcccgtcggcgctcgccccggtgagggtgggagttccggccacggtggtggcgggaatctggttgggtttcgcggccatcagggagcccatgagggtcggggcggcgatctggacgagggcgactttgcgggcggcgggatcgcgggtcaaccagccgcgggtgaaggtgagcgcagccgacgtgatatcggggctcagcggggctggtgtggcggctgggtgggccgttgaggagggccatacgcgcggtagcgatggcgacatcgagcgggtcggagtggggtcaggtgtggggcttagggtccgatgtggcgatggggctaccgccccggtggtgggagacgagactggttgggggtggtgttgagggcgtgggatcagggtgaaggcagccaaactggccgggatgaggatgacggccgcgccgacacttcggagcgaggtcatgtgacgatccttcggtagctcgacgggttgccgtagatcttttccacgttgatgccactatgtgggttgtcggcgctaaccatttggcctccaccgatgtagacggccacgtggtgggcagggcttccccagaggatgaggtcgccgactttgagctggtcacgggccacagcagtgccgactttctgctggtcggcggcggtgcgagggaggctaatgccgatacgccggtacagcgccgaggtcaggcctgagcagtcgtagccgccatcggctttgccgttgccaccccacacgtaggcgtaggagttgttgtcggcgatcgatttggcccatgccacggcttcggccaggttcttcgacacaccggtctcgttagcggccccggtggcacagttgtttgacaggtgccctgtagtagtggatcccactatttgtttggccatggtttcccatttggcgtaggcatcgggcagggctgagccttgcactgcctgagctgcctgcgtcagcggcatcttctgccagtcagcgatgtcgactaaaccgggaatgtggaatccagggccgccggccgatccggggccagcgtaggtgatggtgtggcctttcaagaacgcctcggtggcgtaggcatcattgttgacctgatccagagtcccgtaccagcccggcaggatgcgctgctgaaaggggccggcgtcaccgtcaccgttagccttcgctgaggtagggtcggccccaagatctgattcttgtttggcggtcatgatagcgatgaccgctgcctgggtaggcagtttgtcacgctggaccacagtgacgatggtggtcacgagctgcttctgcctggccgtgaggcctccggcacccacagtgcctccggtgacggtacccacgcaagcatccccgccgacactgccaccgccgccgccagagttgtcgtcgagggccccagagcctactgacagcagcggcacaatgatcacggtcgctggcaagaccgccaggcccgccagcatcagcactgctgcactcaccacggcgatcacgtgagatgctttcaacgctgcccacctctcgctggtttgagggggcgacgcctgctggtacgcacaggcttggttgatccagtccgccgttgattggcaggcctgggtttgatcggcttgctgggacccggtttgggctccggagtcttaggctccggcttcacatgcctaggcacttcggctgcggtgggaggagtcagcacgtggcgtaccggcttggtgaccttctgggcacccgaaacaaccggcttagacaccaccttggcacctttgaccaccggtgcggctgccttcgcgccggccttcttgactgcacgatgcgctttgatagccccggcctcggcccggccaaccctactagcagtagcatcgagggctctgtgacccgtcgttgccctcaccggtgcatccttgccctgacgggcctgcttcgcgatcatcgacataccgccccgcaacgccgaaacacggttgtgagcgtgggcgacggccgacataccagctgtcgtaattttcgactggccctgcggagctcctcccccggtacggatctgacgatatgacgccgaagcacgccgcgccgccgaggccattcgcgccatcttcgcagcccgggtcactcccaccgacgcgccaccggtgactaccgcagccgcagccgaaaccatccgccttcgacccaatccagtgagcttgcgaccaccgctgcgcaccatccggcgagcaccccgcccagcccactggccaatcgccgacgccccttcagagcgcttactacgcatccagtcgttgatcttggccctcagcccctcctcacccttgtgactacgccacagagacaccaagaatccgatgattcccacgatttccaacatgttgacgaccatgaccttgatgacaacgttgccatcagaggcgaagaccgacttgatgacgagcatgaccacgcccagcatcaccatcgacccaacaatgccgatcatcgagtacaagatcgaacacagatcccggataagcgggtctgtgcgaccaggaatagcccgcagcacgttgagcatcgacatgaacgccgaccacaccaacttgcacacgtagaaccagcacatgcccgcgaacaccagcaggattgctgccaaacccgtcaccgttgacgagtaaaagaagaaccccaccaaccaggaaccgtccgcaatatcgccggcgtaatccgataatccctcgtcacaatcaccgaggtcgtcgcgtgcatccgagatatcgtcgtaaggaccacctttgagcacctcgatgtacttgtcgtgacatttggaatcaataatgcggccgtagttgagttgctgatgaaccggcgccacgaacgagtccacaatgatcgcagacagcttcggagccttcgagtctcccgtcgaggtcatgtcatcaggaacctcaacctcaccagcggtcgccgtcccaggatcaaccgaactggtaatcatatgagacagcgccacaccgaactgctgggtgcgagccagcggagtagccaacgtcgtcgtatcacctgcaaaattcgccaccggggccgccaagaaacccaacgccagcgccgcagcaatcgccgcacgcgcacccgtagcccacgcccctgccgtacgtcccctcatcatcttgacgaccacgcccacaccggcgcacgtcgtcagcaacgtcaacaccgttccaccccagctgtccgctcccagcggggccaaaaccttgtcgtggatatcgttctgcaaccccaccagcggtccggtaatccacccgacccagctcatcgccacggtccagtccaacaaccggcacaacagggcaatgaccatcaggtacgtgttccaacacatgccaataatggaggcccacatactcttcagcggggccgtaacgccaccatcgtccatcgacatctggtactgaaacaagtgaataccgttggagtcagtcacattgaaaccgtcacccatccagcccagcccaggacccgacgccatggcaggcacactgctcagcgccaccaccagaaccagcgtggtgacgatgatacggaaccaccgctccccggttccgggacggcgtggatgacggctcacgctgcctcctggtcgtgctcgggcgggttggagctggcggcttcgcggtggggagcgtaggcaggtctcagtagtcgaatttcaccgacgttgccgtgctgatcggcgtacaggccacaaccgggacctccggggttgagggcaatcttgaccaggtcagcgaactcttcaggggacgttttagggtcaacgcccaggaactcgacacctttctgggcgaggttgatgttgtcgcacagcaacacgatgcgatgctgaatgaggttacggacggtctcgttggggtaatcggcctcggggtcgtgggagccagtaatgagccaggcgttggctcggcgggactcacgcacgtactcgtcgatggcgtgggaggcctccggcgaggacgacatatggtggaactcgtcaacgatgaaagcggcgtcgcgggcccggtcgctaaagcacaccaggcgagccagacgagcaatgagcgcgtagagagcccggccaaacaccttgtgcgggggcagctgacgaaacaaatgttctgacagcatctcctcggcgttaggaagagcgatgccacaagtgccaatgatgaggatgtcggcgctcaggtcggcgggaggaaggtccgggtcaaagatggccgacgctagggaggccgagttctcgatgtcagcgaacacggcaatcctgtcagcgatcgcggtggcctcgggaaggtcgcattcctcggccaggtggcgggccaaacgcccacacgaggtgatctggtggtcacgcatgtaggccggtttgaggaccttggccagcgtggtcccggccacaccgatggtctccaagttaagcaaggtcagcaagaacgactgggcgacctgcccggccatctccggaggaaggatgcgcagcgggtccagcgacagcttggggtgggccgtgtcgacgatctggcgtctaaccccgtcgatagagttgacaaaggttacccactcccgctcatcggagttgtcggtggcaataatgcgcccgccccgggccgcgatggctgcgcacagccgcttctcggccatcgtcttgcccgcgcccatcttgccgatgaacgccaccgtgttgcctttctgatcctgagtgtcggcatgcaaatcgaggtaggccagcgactgcaacggggagcctgtgaccacagccaacgggatgccggtggtacggcccaaccggtactcgaccaccgggatagatgcggcgaacgcggaggcgtgagtcagctgacggtaggcgcgaagcgaggaggagaaccggccaccgggccgggcagcccacagcaagtcctcctgacggcccacgggacgcacccacgtgaagtcaccgaacaccggatcattgacgaacgctcctgccagctcctcggtggtctcaaagtcaggagacgagacagtgacggtgataagagcctggatctcgacctcacgctcatcggcggccagctcggcgttgtagtcgacgagcacctgagcggaatgctcgatagacatgagggtcgaagcctgggtcatctcaccgccctcgacgttgtcgagctggtcgacggtttggcggatggcccgctgatttttctgcatcgcagcgtgacgggtccgggccactccccggatcgccacgtcgaccggcacgccagtgtcgtcgatacggcccaggaactcgtaggcaggccacgtcatcgtgcggggcaccttgcccagcgcaatgtgggactggtagacggtctcgccggtgtcggcaccgattttgaggacgcgacgattccacgcctgagccgtccgggacatgtgggagactcgcttgtcatcctcgctggccagcaggtcggaggtcgcggcctcatcgatgaccaactcccccagcgcggcacgtccaacctcatccatgagggcgattccctcgccaggggcatcatcacgcaaccgggtcgggtggcctgacaggtgctgccgaagccagatctgttcatcaacggtgaccgggcggggttggaacgctgccggcagtttcgcaccgaattccttagcctgacggagggcccactcccgtgcgacacggccaggagcggtggtcatgagtccggcggcttcggtgattttgttgagggcggcggtccaggcggtgtgggtgcgtattttctggtcttggttgagtttgatcgataggaaccacacgcgccggcctagggattcggtttcaggctggtcgagggtggcgtcgatttcgtcggcccacacggggtgttcgctcaggtcgaggccggcggccatggcgtcgacgatttctgcggggtcggtccaggtgagggctccgttgaggcagaactcgtggcgggcgaggtggcggaataggtcgcggtgagctgcggcgacggtgagggaggcgttctcggtgacgggtcgctggaggggagtgagtcgccaagtggcccagatgtcgccggtggaggtccagacgaggttgtcgaagaggaaccgttcggggatggacatcatgactccttttcggcggcggcgaggaaggcttccaggccgctgcggcgtacagcgttcccggtagggtgcaggggttttctgggggtgggttcaggtttcgggtctgggaggggtttgggctcgtaggtggtgtcgatgtcttcggcgaggacgtggtcgagcaggcaggtggccggggtgtcggtagtctcgtccagctcgtcgatcatctcgtcgaggaggttgggggtggtggatgcggcccacacaggtgggatagccggtgcgggtcgaggcggtgtggggaggcggagtttggtttggccccagaggggtgtgtgggtcatgccggcgggagtggtggcggcgtgagtggtcacgcgccaccagcccgccagccatgccagaggtgaccaggtccagtcgatgcggccgatgatgaactgggcgagccatccggcggccagcgcgaagatgaaaccgcggatggtcatgcccccgtcgataattttgaagcccatcatcgcggcaggaactacgccgccgacagcgagcacctgatagatcgtgtaaggcccgccggggatctttcgacccgaagagtccttgccgatgatgcggggctgctggcgggcttcggtgtgccactggatgtccatgacttgcttccgggttctcggctctaccgggcgggagcctcaatagcggcctttgtgtgctggggaatgtccatgtcagcccttgcccagtccctgcatcatctgtccgaagaattggatggcgttgccttggatgagccagtacgccatgccacagacgaacagcatggagacgattttcgcgaggctcatgccgtgtcggaagatgttgaacgcggcgagggccatgactgcgagcatggcgacggctcgcactgcggagtttccttcacctgccttagttgtggtccattcgaagaggttctgcgattccagtggcagcaggaggaattgatcgagcatgagaggttttcctttcaggaagccgaccgggatggtcccggtactgacgggctgggcgacacgggtgtgccgtccggaggcagaaggcgtgacggctggtcgagggaggcaacctcccagcggcctgcacgactgacaagagtcaggccgtactggctagtccgggtagtggattcgtcaccggttagctggcatgtcacggtcgcggtgacagcgatcttctgccgatctgagggggtggggatctcgtcaggccccaccacatgagtggttttcaccgatacacacggggctgggtcaatcgccgtgaaagcggtccccgggctactccatctcgacaggtcgtcgctgccactcagcatcgcggccaagaaacccgaagaggtctgggcagccgggtcagcaggacgaatctccgaggagtccacgtcgggggctgaggccggtgcaggcatggggatctgcccaggcaagcgaagagcgatagctttgccgccggcatcgacgtggaccggaaccgaccaggcctgtccgctcccggattggccgcccatggtgatcactgtgacctgccacaggctcggatcagacggggagacggtagcgtcataggcggtgacggtggtgggcgctggaccaggtttgcggggcaaccgagcatcggtgatcttggacgccactaagtggcccagattgtctaggctctcagagtcagatgtcagcagcagagtcgtcacttcgactgcggtagctgaagctatctgagctgtgcggcgatcgtgatgggtggtatcagcgctgacagctgtagcgggggcatgcgaagggaccgccgaacggatcagagcgacaggaccacacgcgaccccgcacagcactaaagcgaggaagcccttagtggacactgatccggcgtggggccaggggctagcttcttcttgtgtctgcttcttcttggccaaccagcgacggcgaggcctggggttagcggattcgccttctgagttgtgtgctcgtcccagtcgcataggtcacctccttcattcactgcatgaagggatggggcgggtggccgatgtgcggtcaagtgcgaaaaaagttcaaattttttcgcgggctgtcacaaccacgattacagcggggttggtagcaggtttcacgacaccgcaggtatgtgagcctcacaaggggaacccctgagatacagaaacccagcaagttaagcgagtcgggcccaggcgggacggtcgagtgttgacgagaggtaggcgactcaggctggtggcttgccacgccgccagctccgtctggatgctgccacgaatgcgcgcctcgatgtcatggcggctgagactggacgcagtgcttccgacattatgcgcaccgccctcgtcaattatctcgacgttgccagctgagttcgggcatcccagacagtgggggcagaccaacggatcgcccccacgtacgcgtggcgagccgttatcgtcgccacactcggacggtgtcggtggtctttaggggtgccccttcgggtcccttgaggtagctgttgatccatcggggccggtgggagtgatcactggggtggtattgctggcgccagtggccgcgcacgaggaatcgcgtgtgaaggcggcgtcctgtcccgtcgcggtcggtggcgggttgggtgcgcagaggtcgcagatcgacgattgtcactggtgaggtcgactcaccggtacgggtggcccgctgcacgtcgcggcgcgactggtcgcggcggcggcgttcggcgacttgcggctgggccatgagggtccaggtggcccccacgagcgccatgaccgcgccgacctcggggcacgcgggggcgtaagcaccggaagtaccgtctccgtcgaggggcacactcacgacgtttccgacacgcaccgacgtggcctggtcgtcgaggacgaggatgacttggagctgggcgccgatgacgccccacaagacaccgcgcagtggctggcgaactgtcaagggtgctgccgcactcgcctggtaggccgtcaggcaagtgactggcggcagtggtccggcccacatgagtaggccggtcgggcacggtagggctgccgcgacggtccaggcgggcatatcagtcgacgcgtcaagggccagcgcggtcatgtcacggctgacccagtacaagtcagcttggcggactcgcgtagaccattgcggcgtaccgggcggggctggatgacctcgccgtgtcatgtcagcatcgagggcctccacctcggcggccatggccgccctgcacgctggcatatccttgccctgttcgattcttctcgtcatggttctgtcttctgcccggggctgcttcgatacccctatcatggacacatgataaccgcaatgccaacaattacggggtttcttgacttttttgcacccgattggagaggatcggcggactggaaaatcgctgtcgaatggcgcgctttcggggccgcgaatgaatagttcaatccattgcagccgccgcaattttcgaccctgtccgtaggactcatggatccaatgtccccgcacgatgtgcggggtcatcaggtggcgacccaagggcgaaagcaatagcgattatgcggacagtttggcaccgcgtagatcagcgccggtcaggttagcgttggacagatcaacgtcgtgcaggctaacgccgcgtagatctacgcggcgttaggcaggtcagcacgccacaggctagcgtcgcgtaggttggtaccgtacagtatgacactgcatagatcgacatcgtgtaggtcaacgctggacaaattgatactgaataggctaacgccgcatagatcggctcgcgtgttatttttatgcgccgccgcgacaattgcgagcacttcttcgcgattcataattcctccatatggtctaatttttgttggcgtcatttcgcctttgtcgtcacggtagtggtgacacctgggcggaacctccatgtcgacatgttcatagtagatatgctgtggcgtctattttatggtggattccttatttctgggcgaggtagttgtagatggtttgtcgggtggtggatagggcgcgggcggtgtcggtgatggtgtggcctgcactggtgaggtggcgggcgaggacctggtaggcggctctgcgagcggtttcgtgggtgtcggggattcctgtggtgaggggtcctagccagtcggcggcggcagtggcggcgcgtggaccccagacgtgccaccaggcgtcgacggcgggctcgacccacagtccgcggcgtaggaaggcatcggtgttgagggcttcgacgaggtgggcggcgccggcgaggtaattgcgggcagggttatggatggcgtgggcgatagctacggcgaggcgggcgaggtcgtcgtcttcgacgactgcgcgcaggattgcgagggaggcgtggacgtctccggtgcggatgtctgtgtcggtgatcgcggtgagggcgtggacatagagggggggttcggggttatcagcccaggcggcttggatcgcgccgatggcggcgcgtacgaggtgatggcgggctgcgtcgaggtcggtggactccatgaccacatcggtgaggatcgtggatagcgtgctggtcttgtcggtgaggatggctgcctctggccgatcggacgtgagtgcggtctggaaacgctgaggatcgaagaattcgaccatcgttagcatcgtggcgcggttgacccaggcggctagtggagggcctgagagtggatcagtggtggcggcatagtacgccagtcgctgctgggatgtcatggagtgtcctttcagtgtcataccgttcgggggcattgctcgcttctattatagacatatatttccccttagtgtcaacaatgacgatcccgtgtgggacgtcaggttttcagggtgctcgggtggcgggcatgtcagtgcgggacaccgctgctgcagtgaagttcttgtctgggccaccggtgaggcgcgagtcctttagcattactggcggctagttgctgcgcccatggatgggcgcactatcaggccgtggtcacatccactattgggcccgcgcgaatcaggtggtgattgctcacaggctggagtgaatgatggctcatccaggtgagacggtagctgcggtggtatgccacgcgtgcgacaacgctaggtgccagaatccgtcacatttggtggccggtaccgtgactcgcaatcggcgggagtacgtgagacgagcaggagctccaggaacaccgttaaatgacgtgcatggcccgcggggtgggcgaaattgtccaagacatcgttggcgtggaagtcgtgacggtgaacggtgccgggctagtgctcatgactgccgttcttgctaaatacgtcccgtacagaaacttttatcacgtggccggagctgtagttgtgtacgcgtgtcttgccgctgcggcggcagtgccgttttggtacatcgtcggcgtaagcggtacccaactgctcatccggcaactgatcatgtaggacgcagcgcacggcgtgccgaattaccgacgttggtcggcgcggtgtttatcggaaggctagcttcatccgcgacgcgagacatctcacgtagctcgcggcgacaatggtgacctaatcactgtggagccggtatcgctcgatgatctgcgtggaaactggacggccgaccgcgggtatctcgtcggcgatggggtggcgccgacaatcgccagtctgcagctgatctgaggtcataatcctttatctatgtcgtagcgcctgggaggcactccccagggtcgtcgtgtgtgcggaggtagggccgaaggctttggcgagataggcgacggccccccaacgctgctcgatagtgacgactcgacgactggtcgatcaactagtgtgggccggtctcccggcccacactgtgatgatcaatcggtcagactcgacgcgtcgccgcgtataggtctgtccccgaaatatcgtcgaggatccggtcaccgaagtatcgcagcgtaatttctgatgctacgtcggacagtaaccccatcgtgacttttacgacattccgacgccgtgctgacgccgacagtccccctaggctgaattgcgtcgtcccaagccactgccagtcgtcaatccacagaccgtcgccacgggtgtcggtgtggaactcggcatgggctgggacgactgtgccatcgccgagctggtagtacgagtcgacagtccacgctaggcgacccgcctcatcgcggtggatccggccgatggtgatccgatccaggtcatcagtgctaatctcggtcatgtcagaggtcctttctctgtcacgccctcggggagttgccgctcctgcgggggcttcctttgttttgatacctctattatagacacacagattcgatgatgtcaacaaatatcggggaaattcttggcttttttctgcgactttcgctgcggccggtcactgtgtcacctcgtcgatcgcggcgagggtagcttgcgtgagcgccccccagtttgctcggtacgtggtgcacgccggtcgtgccgagaagatcatatccagccccacgcggatcgtcgcacatgtcatcccagtcgtagttgctgtcgtattcgctgatatgggtccatgtcgtgacagtgaagccggtcctcatgacccgcacccacctcctgccggcaccgctccacggcacagccaccccactgactgtagtcgaggcggcatcaatccccaccaacatcgacttcgagaccatagaggcccggaaggtgcagcccggcggaggcatggcccacctgtcagcagaccgagcccgcccgatcctccaggttgcctcctggctgagcgcggcctggatactcatggccacccccaccgtggccgagcccagctcgacatgcgactcatgcgccaggttcacgccgtcactgacccgaccggccgacggctgacgaccgcgcacaatatgcctggtcgttttaggttgattacagctcccccgagctcaggtgacagggcgtttggctaaggcgttcacggcatcgctgatgatttgtttgagggtggtcccgggatgggtggctttctgatgggttagccattggtcaatgtcggcgggcagctggaaagagcgtggctgaccgggggtgcgcacggtgtgggttccgaagccgttaagggcggccgggggttgttccatatcggcggccacggctagagcatggccgatgatcgcagcgatgctatgcgaggggtggtcggcctgccatccggccaggagggattcagcgtcgtcggtgagagtgacaccgcgctggcgacggtcggttcctagatctagggcgggcagggtttctatgacggggttgtcgagccaggcacgtagcgcggcgtggacagtggcggtcatggtgccggagaccctttccagggcggtgtcgatcttgggatccaagcgcacctgaacggatccggggccctcggggagtttcccggccggtcctccgcggcgaggttggacggtgtcagccccggccacgcccagatgacggcgtagcgcagcccgcacgatggttgccttggggacgccgagttcctgggcggccgacgctagagagcgatggaggtcggcgggcaggtggaagaccctgggggtcgggtgggtgcgtttgttgctggggctctttgtcggctcggcggtgatcgggtgagcggtgacgtagtcgtcaatgaggcatacggccaggcggtaggggcgaattccggtggtctcggccatctcatcgagggcgtcacgcatatccggggtgacggtgagcatgactgagactcctccagtgcgggatgctctggcagctcggccacgggttgaggaggggatggtgtcggggatgcccagggcctgcgatagcgcggtgcggcacacggcggcgcgggagactccgcgataggtgacgagggcgtcgagggccagggcgagggtgtcggggatgcgcaatgccagtcccgggttggtggcgtgggggcctttgggtgccatcggttcggtattggcggggtgggcagccaggtagtcggcgaggatgtgagcggccacttcagagcgactggtgtgggcggtggcagcgcggtcagccagagcggcacgtatctcgggagtgatagatagccctagctggaacgtggccccggtgtgcggggccggcgtggctccacgtcggtaacccgcgctgatcgtgtcgggtagatggaaggtttcagccagggcggttcgagcaaccgccgccagggccacattgcgcctatctgctagcgcgtcgagggtggggcctagctcgggcagatggaggggttgcggacggtcatgatggggtttcctttggtacgattgaaactgagcgcgatgcttatcgtgttcgatctgatgtgtgggtcctcgccgagtagcgagggcccacactgtgttgttgtcggtttataggtcaaggtggggtattccacacaatccgagagtcgtggttggcggcagcgttgtcgaccacgtcgaggatgtctgcagcagacgtcgtgatggtcagctgccggtctctgatggttttgtgagcagtggcttaggtggagttgccagcgtcgactagacacacgtcgatgtcaggagatagtgacgtggccaccacgttcagcttatgttaagcctagacattaacaccacggtggacaagtcctgccgtttccccttggggggctcatgctgatctggttgtccgctgtcttctcactagatgtgtgctggtttttctgctcaccggtacacactgctcattgctagacgtcgtgtctatgacatggctgggcgtctagcagacgagttgacatcacccttaggctggcagcgttcgaggccgcaggccagagaaagcggacagcctaacgattgacgtccccctctattcttctctcccgcctcccctccccccgtcccctgaaagccgctcttcatctagcgttcccccgccgccgacaccttcctcttttactcaggttgagtcgaccatccatagatagatacatatgcatcggtgtatcgatctatcgatgtatctgggtctggttttaggaggagacgctcccagctacccctagagccaggcccctgctttaagcgtgctgccaggtaatgcccccggtttggcgagcggtcacccacacaagggctgggctggttgctactcccgccagggatagcggacatcctctatacacgtctgtcagtccatctttttcgtcgtatttccccttgtcagagcgttcttctcaaagtgacaacgctagtggccttgacgacaacgtcctcgacaacctcatggcggtggtctgtgtcttgtcagatcaaccacaccgggaaagagacaccgccgatgttcaccaccacagccaccctcaacgatgaatgggaccagatccgcaccattgagatcgattggcacgactgcgctgagctgatgcactgcatcgacgttgaggatgtgctggccgtcattcctgccgcccccgacgccatcttgggctacctcattgcccgggctcagggcggtgatgagttggctactcgcaccgtcatccaagcgtttgtcggcaagctcattctaatggccactgccacgaagctgcgtcgcactaataacggtttcgatgatctgttggcgggtctgtgggagacgatcatcacctatccgttggatcgacgtcctgacaagatcgccgcgaacctcgtcctcgatacgttgcaccgagttgtgaagttctggcgtgccgattcccccgatgaggaagacgctcacggattggtgcccttccccgatactcttatcgcccccgagcccgatgaggacgtcaccgcatcccaggctattgccctggctgctgaccgtcattggatcaccgaggacctggcccgcctcatgaggcacatctactgcgacggcatgaccggagttgatgcagcccgtctgcatggttgcgctccggccacggtgcgttctcggtgtcgtgacgggcgggctgcgctacaacgcaatgccgaggagatcctggctgtctgctgatctttccctcggctcgcagccgcctccaccgatggtgcaagctagagatctagcatctcatatagttgtctagctagctagattgatagcaatttttctagctacatctctagcacatggtatagcggaattacggctggatcgctagctcaatggcatgcttgccgatggaaggtgtgtcgacctcccaaaaagctggaaggagctttaccgtgcagggcatgaccagtcccattgaccgatccccgttcgaccgcaccatcgcggtatggaaccacaagggcggcactttcaagacgtccgtcgtggcgaacctgggatacctgttcgccgccggcggtaacaaggtgctgatggtcgacatggacccccaagccaacctcgacatcgacctcggtatccctgctggggaacgcgaacgaggcgtaggactagccgaggcgctgcgtgaggggaatacccttcccccaccgcagcatctcagcgagaaccttcacctgatcagtggtggcccagccctcaacgaattcaccgaccccgcctccctcgcagccatccttgagcgggtcacaaccgcacgttacgaccttctggcccaggcgctcgcaccactagcctgggactacgacctgatcttcatcgactccgggcctgctcagactctgctatcccagaccatccttggagtagcccgctacctagtcgtgcccacccgcaccgataacgcctcgatcatcggccttgttgacgtccaggacgccatcgacggggtcgccacctgcaaccccgatctgcaactactcggcgtcgtactagccggggtaggcgcccgcgccactcggatcgccgccgataaacgccacgccattgacacggtcctgggaacaggaaccgtcttcaatgcggtcatccactactccgaaaaagtggccgtactcgcacgccaacaaggcaaaaccgtcgccgagctagccgccgaataccaccacacccagcccgcctacacctacctagcccagggcaaaaaggtccccaacgtcgccaaagcggccgtcagcatcgaaaccgactacctgcggctggccaccgagatcagtgaccgcatgtgcaccgacgacgagcaggaacccactcatgactgacgacccgacctcacccacccaaacctccaccagcgacgacatgcgcctagccgaggaatgggccaatagcggccgcacggtgggggcccttccgcaccgtcaacggcctaaaggctctattccccgcaccgccgaacagccccctgtctcgtcccctgccacccacacaccagccccgaagaaaccccagacggccacaaccacccagcccggacgccagcggatcaacgtcaccgtctacgtcgtccccgcactccacgagcaactgcgctcccggtcggcggcgacgggggtgacggtttcggatctggtggtgcaggctttagcgttcgtcgccgatcacgcagccaaggctgtcgccgatgacctgcgtgtcgagacggtccctggtgatgaggctggattgttcgatgtgaccccgtcgcggccggtgggggtcgccaaaacccagttgggggtgcggatgacccgccataacaaggctggtttggaccagctgacccagatcagcggggcccgtgaccgcagccatctcgtgtccgtcgccgtgcgcgactatctcgactccaaccctgtaaagaaaggccgacatgtccgctgagactcctgctgcttccaccgagcggcgttttgatacgaccgtcaagcccaggcggcgacccttattcgtcgcggccggtatcgccattgtggtggtcggcgcgttgctcatcacccagttaatccacgcgagccagaccgagaatcgcgtgctggaggttcatgccgatgtggctcgtggcgaggtgatacgtgacaccgatctggtggcggtaaccgtcggccaggtcgacaacgtgtcgacagttcccgctgatcagctcgactcactggtcggcaaacgcgccacggcagatcttcgagccggatcactcttgcctgccggggccattggtccagccgatgtcgttccagctccgggcaagtcgctggtcgggctgaagctagccgccggacagatccctatcggagaccttgctgccgggacgaagctgcgcctgatccagacctcggcaggcgggtcatccaccaccgggcagggcgccaccaataccgatattcaatcgtgggctgcgacgatggcgtccggcaccaaaagtactgagcaggtcaccttgatcaatgtggaggtggactcgcgtgatgcagctcggatcgcccagctgacatcgcagggccgtatcgctgtggtaaaggattcgactcgatgagcacaatcgttttgaccagtgtgtcgggagccccgggggtgaccacgacagcgattgggttggggcgggtctggccacagtccagtctggttgtcgaggacgacacccatcacgcgatgttggcgggctatctgcgagctgcccagcacgccgagccgaacttggccacggtggcaaatctgacggccactccgaccaatgcccaaaccgtgtgggaatccatcgccaggcctctgcccaccgatgatccggtcagcgggctgagacgcaaggccgtcctcggcccgcccacaccgtggtctcgtgcaggtatcgacccccggtggggattcatgctggccctgtggcggcagctggccgaggccgggatcgacaccatcatcgacctgggtcgcctagccacgccgctgacgtcaacgccacatctgatcgccacacccatcatcgacgacgccgacatgatcctggtgatgatcgaggcgacgctacgcgatgtggccggcgcccacacgatgatcgaagggctggccgagcagatgaacctggccggggcccaccagcgcctcggactgttggtccaccgcggcggcgcggcccgcggggtcgctgagttcaccgacaaagagatcacgtcggcgttgcagctaccggtctgcgggtcgatagtccatgacccagtcgcggcagcccagctgtctgacggggtcgggcagcggttcgacaagtcgcgtctagcacggtcgttgtcgaaggtggcgggcgttctcgttgatgtcattggtaggcgtcgtgctgatagcaaggaggatctgtgatgaccggtttttcggacaatccgttcgacaagttgcgctcgcgtcctgatgctgaggtgtggtcggcgtcaggggccgtgcaggtaggcatgggggaggctccggcgggggaggggcccgggtttgtttcggagttattttcggcgtcggcggggtgggccagttctcagcaggtgactcaggctcccccggtgatgacccgctcggagaaggttgattggccgattgttgcggagctggccagtacggccacagacgagattgaggccgagatcacccggtggagttccacccatgatggggtagcgacgctggacattcgtcaagccatcgcagagcctgctatcgcctcggctgtggccacgtatgctgaccggcgtcagatcgatgtgggagagacctggcctgatctggtacgtcagcgctaccgcaaggctgtgtgggatcagctgttcggaatggggcggctacagccgctgttcgaaatcggcgacgccgagaacatcattgtggtgggcaaccatgaggtggttgtcgatcacaacgatggttcccggtcgacgttaccgccggtggcggactcggacagcgagttggaatcccaaattgcccgaatggcgaggaatgcgaccccgcggcgggccttcgacgccgatcacaccgatgtgacgatcatgcatgagcagaagttccgtattcacgcgatctcttcggaggtgtcgttgcagccatcggtggtgatccgccagcacttgctgacccagatcagtttgggggacctatcacagcgcgggatgatgccagtggaggtggcccggttcctggatcaggcggtgcaagctggcaagtccattgtggtcgccggtgagcagggtgcgggcaaaacgacgtttctgcgcgcgttgatccacgccattccgatgcgcgagcggttcgccaccttggagaccgatcaggagctgttcgctcacttgatgccgggccgacaagacacgctggtgttgttcgcccgtgacggtaacggcgaggtggatccggcgactggcacccagcacggtgctatcgagatcgcccagctcattccccctagtctgcgccaggcgttgacccgggtcatcgttggtgaggtgcgcggaaatgaggcctcggcgatgtttcaggctatgcagtcggggactggcactatgagcagtatccactccccgcgagcctctgaggtgccgtcccggctagcccagatgatttcgatgggtccggtctatgacctggatcaggccatgctccaaattggtcattccatcgactacatcgtcttcgtgcgcaagcgtgacctgtctgacgggacccggctgcggttcgtcgagcagatccgttcggtttcacctggcgattcgacgactcccagtcttggcgaggtgtatacggccgattcgtggacaggtcagccgttaaccccgcttatgcctggttcagcggccgatgagttgtctcatttcgcccgcgacttggattattgcgaggcccactcatgaacgcacctgcactgaccagcgccctcatcgtgaccgggttggggctgatcttggttatcgacggtctagtgccctcaacgcctcgtcctggagccgcgctaagcccggcccagaggtgggccaggctcacccaccgtcccgctggtgcggccgggcgtcgccgggatttgcgttgggggttggctgttcttgtcggtgtcgtgttgtttgtgctcaccgggtgggtggctgcgctggcgttgggccccattattgcgctgctggcccccaccttgctgggggcggccccaccgaccgatattccgctcatggaggcgctggatcggtgggtgaggcaggtggctgcggtgctaccccaggggcgcgacatcatcacagcggtgcggatctcgaggccgcgggctccgaaaatgattgccgagtcggtggaccagttggtgtctcggctggacggacggatggagccgcgcgaggcatttcagaggatggccgacaagctggactcggctgaggctgacgcggtgctggcctctctggcgttggcggccactcatccgcggggtgcctcgacgacattgaaggctattgctggcaacattcagcagcggttaaaagtgctgcggcaggtggaggctgagcggtctaagccgcgcaattcggtgcgtcagatcacgctggttacgatcgccatgttcggggcgctgctggttattgggcgggcgttcctggccccattggcaacccctcctggtcagatcctggtagccgtggcggtggtcatgtatgtcaccgcattagtgcagatgtatcggatggcgcgcccgcggcaccgcacgcggatcatggttaggaggagtcgatgacgacgactgcgttgtccctgctggccggggctattgtcaccgtcgggttgttggtcatcgtggcagcgttccggcctgccccaggccctgatctagtagccgccttggacgtggtatcgggtcgcacctcggcccttgacgagcaggtctaccagacccgggtcgggcgtttaggtcgcagcgtgacccgcacgttccatgtgtcggtgtcgccggcgatgcgagccgcgctgcggttgcagggcgctacccccgaggcgttctacgggcgtcgtttgatttgggcgttatgtggggcgatcctgccatggctactcaacgcggtggctatcgcggtgggggtgaatttcccgggcttgctcatccctgcggcgctgtgtgtggcgctggctggagctgggtggatgctgccggcggcacggttgagggctgcggccggacccaccaacgatgactcgttcgaggcgctgctggtgtttatcgacttggtcgtgttggaaaggctcgccaacgagacctccgtcgacgcgctcaccaacgcggcgaacatgtcagatgccccactgttcgtccagatccgtcaggtcctcaaccgtgccgccctggaaaacgtcgacccgtggaacggactcgaccggctcgctgacgacattaagctgcccgaactcaccgatgtggtctccatcgcccgcctccaggaggaaggcgcttccttagtcgatagtttccgggcccgggtcgccgagttgcgcgacgcctacttgctgcgcttgcagcaagagtccaccacgatcacccagcgccttggcctgtggacgatcctgcaagccggatcggtcatgctcatcttgatgggggcggccgcgctcacactgattacagccggataaaccgacatcgtgtcgagcccccatatgggccgcgaacctttcataatgatgcctgtaagcaccacaatattgatcacaacctaacaatgaaggagaaatcatgatgaccgatctcgacctggctaaaaaacagatcacctggctggcggcgcacctgcgttcccggatcgttgacgagcgtggcggtggtagctctaccgtggagacactgatttggattggtcttgtcgtggcaacggtggttgctgtgggcgccgtggtgatggcattcatcaagtcgaagatgcctcactgacgacgatgcgtagcaggttcacaactgatcagcgtggcggtggtagcgcgtcggtggggatgctcctgctgatgcctgcgatcatgctgctggcattcggtgggatcgaggtcgggatgtggtgtcacgcccatcagtcgaccatcgcggcagcccaaagcgccgcggaggctcagcgtgtcgtccatccagctccggggtcggcacaggaggcagcctcgcagatcactagtcatggcggggtgcgtgatgcgcgggtgtcggtgcgtgatgatggttccactgtcacggtgaccgtctcaggtcgggccccatcgatgctggggctgcatcttccggctgtgtcgtcgacagcgtcgatgcccaaggagcgcctgtcgtgaggcgaagtgagcgcggtggagcaagtctaagcgtcgaggtgctcatgtgggcgccgatcgcgctggtgatcatcgggtttgttgtgggtatcggccggatgtcgatggcccaggacgcggtgagtggcgcggcgggggctgcggcccgtgcggcgtcgttggagcgtgatggacagtcggctcagtctgcggcacagcaggcggcgtcggcaaacctgtcgtccggtgggctggcatgtgcgccgagtgtgagcgtggacacgtcagtgtttgcccgtcctgccgggcaggcgggcacggttcacgccacggtcacatgtgtcacctcgctgggtcttgggttcgggtcccggacggtgcacgcaacggggtctgccccggtagacacctatcgggaaaggagaggctgagatggcccgcgatgagcgtggtggcggctcggtgtcggtgtggatgctgctcatggtgccagtgattctggtcatggccggcctggtttttgacgggtcccgtcagatatcggcaacccaggcggcccaggacgcggcggttgcggcatcccgcgccggaactgatgcggcagcgacaccgcagctagctggccacgacggggcggccgtagcagtccaagcggcccgccaggcactatctgctgccggggtggacgggtcggtgcaggaggacgggtcgaccatcacggtgaccacgtctcaaagtcggccgacagtgttcctgtcagcgatcggaatcagccaggtaagggggcatgggcaggcccatgctcagcttgtgggaccgggagaacgcccatgacagtgatacgtcgtatcggtgccctggtggcactgcttgtggtgatagccggcttaccggccgggctcgtggccgcaggcgccccgctagtaccctcgggcctgtcatgggcccatgtgcggcatctgttggttaccccagacatgaccgggtctgtgctggtgtggctggtcagcctcatcggctggatcgggtgggcatggttcgccctggccgtcgcagccgaagcggtgacgatgctctcagggcagcggctgcactggcacatgcccggccctcgcctagtgcgccgagtggcagccggtcttctcattgccgcgttcgcggccgcaccggcagccacaagcacggctcacgccgccgaggccacccatgtggcggtcgccgcccaggctggaccggcacacgcggcccccgcccaggacagccccgccaccacctctcaggccccggacgcctccaccactccgaaaatctggaagacctacacggtgcgggccaacgactacctgtggaagatcgccgagcactactacggtgacggcgcccaattccgtcgtatcgccgaagcctccggtatcgacccgcactcagagctgaaagtcggccagaaactggtgctaccggttcccgagaacacggccgcagttcattcggttaaagcgggggagtatctgtgggagatcgccgagcactactacggtgacggtgcccagtaccataaaatcgctgaagcttccggtatcgatgcccattccgatctagccgtgggccaaaaactcgtcatccccgggcccctccgccacgacgccacgccgccacaccactcggcgtcgacccacgcgaaggccgccaccccagcccacacgcccacgcgacggcctgcgcctgcccacaaagccacgcccgccccgacgccggccaccccaactactccgacccacacggtgaccccagctccggcctctgccggccactcgaccagcgacgagcacccaatccatacggataccgccgcagcggacaaggccagcgacgaggacgccctgtccccaatccaggtgggtttgaccgccagcgtcggactggtgctggtcgccggactgatcaccaccctcaaccgccgctaccggacccggttcacccgccagccccgcggcaaggccatgaccctgcccagcccggacgcccaaactgccgagatagcgctgcgcagcaccggggcgactgacactctgacgatcacctgcctcgaccaggcgctccgcgcgatcggcgcatggtgccaccactgcgggcacccgctgccacccctgctggccgcccgcgtcgacgacgaccggatcgacctgctgttatcgcaggtgacccccgaccatcccgaggcggtggagctggccgccgacggatcggtgtggaccctcaccgccgaccggatcgacgacctgctagcccacaccgatgacaaccaagcggctccgtggccgtctctggtcacactgggacgcgacgacgacggcgcccacatcctcatcgacttggaagccgccggaaccttgcacctgatcgccgacgacgaccaggtcgacgcggccctcgccgcgatcgccgtggaactggccacctgtgactggtccgacgaagtcaacgtcaccctcgtcggccaggtgtgcccgggcctagaagaggccttgggctctccaaccttgactcgcgccgccaccgtcgacgctctcttggagacgttggaggctcgcgccgacgatcagcgtcacgttctcgccgaaggaggctccctggccactcgccgagccgacccggctatctccgacgggtttgacgctgaggtgatccttcttgacaccgacctgaccgagtcccagcgttaccggctcaccgacctgatcaaggacctgccccgggtgtcggtggccgcggtgacgaccagctccaccaatccggatgactgggccctgagcttctcaggtgacccgctggtcgcagagttggtccccctcggctggcacatcaccccccagaccctctccccagatctctacggccgcgtggtcgaactgctagacaactctgcggccgacgactacgcacccgccgactggtgggaccatgacgccgaagaaactgacgaggatgagcctgtcactaccagtaggcgagcccgccctagtatccgcttgaccaccctgaccggtggtatcgatttatccagcgtcgacattgacgccatcattgatgacgccaacgaggctctcgatgctgaagagactaacggcggggtttgtgttgatgctgcccagcctggcactaataccccgttccctatcgatgaggttgacccgttaagtggtgacggtccggtcctgtcgatcattggtcatcccgacatcatcggtgccgctgggacgaagggccgctctccatggcgctgccagcagttggccctttacatcgctgagcatccgggagcatcaggagccactatcgccgacgacctaggtctctcacccgcaactattcgttctatgaccacgcacctgcgccgctggttgggtgctgacgggaacggggtggcctacatgccccccgccacgcacggctaccggcttgatgagcgggtcgtcactgatgtggatttgattgatgctgctttggctgggcgaggcatcaataccgccgacaccaccactcttgtcgctatcctcaaactcagccgaggccgaatattcgccggaattcccgactcagacctccgacagttccgagcatccacgtaccacattgaagcccggatcgttgatgcggctcttcaggtgacggatcgggctttggaggccggggacttggatctagcccggtgggcactcacccaagggctactagcatctcccgatcatgaggacctggtagctggatgtgtgcgcaccgagtaccaggccgggaacatggacaaggtcgctgagctggttgatcatctatcggctaccgcgcgacgcctgggtgtcgatttgaacgaggacactacccggattatcgatacagtcactcacttgggcaggaaagcctcatgaatgctcctgcgcctcatttgttttgctagaaaggttttcatgcatcatcatcgcatcatcgtggctgcggtagcagtcgctgctcttacggtcggctgccactcgacaggctcaacatcggcccctacaccggcaccaagtgcctccacggtctcggcgagtcctgcccctagcccgacccccacggcgggggcgatcagcgcgaccgacgccgaaaacatctaccgcaccttgcacaccaacgtcttcgagttggagaagaagggtggcctggtacccggggaacccgcacccgcgaccctgtcgaactacgccaccggccaggccctcaagaactacatgaccttcatgcaccaaatctcgggtctaggtctcacatggaagtcgggagcctcaaagatcactgtggtgcgggagaaaaagggtgataccacctaccccgaggccgctatcgccttggaatcgtgcgaagacggcagctccatccgatcggtggaccgccacggacaggctgaccatggccggctcacacacgtcgacagttggtatgcccgcgataagaagggcaccatcaaaatgatcgcacgtaacggagtggaggtttcctcatgcgacgtcaagtaatcaccgcggccgtgctgggcctgaccctggccaccacctccctgcccgccctcgcagataatggagacttcagtggccatacagacacggatggtcctggttacgatgtgcgtactgaggtggattaccatcacaccaccggtggtgcgggtgggggtgccacgacagggggccatcatgggggcaaaacccacggtgatggtgaaggtgaggctattgatgggcgttctcgcgccgatgccgaagccgaactagacgaagccgaccgtaaccaggacttgacttgtgatgtcatgctcccaccggcgccgaataccccagccggccaggaatgggcgaaagaatgcaatcccccagcgaaaaaggggcagaaggccaccccgaagcccgacccggtgttagtgggccgtcacgcagccttgcagctcacccttcccggcgcggcccctcgtatcgatccgtcccccgaccttaaccggtggcactcggcagcagtgggccaggctttgtggttgtcagttgatgaccccaccgccactacacagaaatcgatcacgtttatgggccaggttgtctcgttgagcgccaaacgtaacggtttgtcgtttgatatgggtgatggtcatgtcgtgcactgtgatgccacgacgacatggacggagtcggtggaaccggggaccccctcacccacgtgcggttacacctaccaacaggcagccccggccgggggctataaggtcaccgcgatcacttcgtgggatgtgacctggtcggtactaggacacacgggcacagtgcatgttgagaaagccggtgggcagatgcttcccgtcggcgaggtggagtcggttgtcacccgccaatgacccctgataacccgagtctctacgaggtgttggggataccaccacaggcatccccaacacagatcaaagaggcatggcgcaccaccgcgaaagcgacccaccctgatgccggtggcaccaacgaggccttcacaaccgcccagcacgcctgggaagtgctgtctgatcccgaacagcgtgctgcctacgatgccgccctatcgggggaggacgcctctgaccaggaggcccttgacggcactgtggacgtcgaccccctcgccgagtggccttggtgtgtccccttcctcgaggccaccccacgactgcgccacccgtgccccggcatagttgagtctgtcgtcgtggccgccgccgggatcatgaccggcatcggctggcacgagctattgaaatcacttgtcgtggccccggggttcgtgggggcgtggtgggtgatttcggttccattggtcgtggcagtgacatggctcggcgcgatcacggggatttgcgccatcatggccgggctcgtctggctgggatggggtctgatcggtggtgcggccttgtggggtcagccgtgggtggtcactgcgatagcaaccgggtgggtggcctgggtggccggtgtggtgtggtggtggcaccgacggatggcctggcctgcccgcacctgccgggcaggaaacatgattgacatgcccgaggatgacccgccgtgggtagaaccggtggagttggtggcagaactcatcccctccgtgcgggctatgtggtcccctgataggcaaaccgttgtcgtgatagccggtcggcgggtagcgacgttagggatgccgatgcgagggtggcgtggcatcgatatgcggggctggaacccgatcggtgccgacaccgcgtggatcgttgaccagataggcggctggctggccgaccaagacaaaccgctcaccatcgacgggcgcatcttgtacgagacctgggacaggctacagacagttcgtcctcacagctgagaaaaattttgggtccgccctgcatatcggggcctcttcataccttcaaaagtgtgaagggaatacagactcttcgactggaattaaaatggtatatggcgtgtccggtccgcacccagctccacgatgcgccatagaggagccataacttcaccaatcgtatacgatatgagtgtaggtgagcatctaccggtggccgacagtcagatacaagcatgggcggatgaagcagaagctgattatgacctcagcatgcttccgccgtctcgacgtggtcgcccaccggtggggaggggcccgggcactgtggtccctgtgcgcttcgacgcggacactctcaaggcgttgtcacaacgagcccctgacgaaggattgaccacgcgttctgacgcgatccgtgctgcggttaaccagtggctcggcctcggctcgtaaacattatcggcgcgacaaccttactgatgacgctgttggttacgccgtagagcacatcttgtactcgtgggcgctcgacgatgccgatgatcctcgttgctggatgatgattcggtgttgacccagctggcctcctcatggagctagttatcctcatctacgacgatggctatgaactcctgatccacgccatgaaagcccgccctcagtatctgagctacttcgctatctagtgttgttgggcgagttgaactcaacttttctccgacgcaagcgccaataaaaggctgatccatccgaataccaccaaacacggctgaagtgtggaacagattcagcaagacagggtgcggtgctcgggtgcgttggggagatgaggatattcaggcttctggcgggatgtggcttgatgacgtccaggatcaccggttcggttttgaaggtgccttgcattaatgtcgacagggtcgtacgactcgaggactggatcgaccagcccgttgcgtctgaagaacttcatccaccccggtggagctccggccgcgtactggtgcaacggatcattagcatgggtagcgtgagtatgccttcgatcgtggtcagtgctgtcatcatccaagattctgacgggcggcttctcactgtccgtaaacgaggcgccgaggcattcatgctgccaggcggcaagccggagcccggcgaggactcgcgtcaggcagtagtccgggaagtgcacgaagagctcggcgtctcattgtcttccgacgacctgcgtcgggtgggagtgttcaccacgcgagcagcgaatgaggccggccatcaggtggtggcgacgattttcacccacaccccggttgcggtgagtgagccagctgctgagatcgagcagattcgttggctcgattggagtgtcgacgccctgcctgatgacctggccccgctgctggtcgaggcagtcatcccgtggctgcggcgccgtatccggtcggtcgctgtattcacgggtgcgaaggatggaaccgaccctcattatcgtgtcgaagcaaccgccttgggccggggtctcgcacacgccgggatcaccctggtttatggcggcgggaaggtcgggatgatgggtgctgttgctgatgcggccctcgctgctggcggcgctgtgatcggagtgatgccgcagcacttggtggacggggagatcgcccatcctagtctgactcacctcgaggtagtgcggactatgcatgagcgcaagcagcggatgagtgacctagctgacgcgttcgtcgcgctacccggcggcggcggaacccttgacgagctattcgaagcatggacatggcagcagctcggtgtacacagcaaacccgtggccttgtacgactcgaccttctgggcaccgctgaccgcgctactcaaccacatgaccatcgaaggcttcatccgccctgaggaccgcgcctcgctcgtgatcgccgataccatacatcagctgatggccgatcttgagggatggaccccaccaccaccgaagtggcgctcgtgacatagaacaaatgattctgactatggctcattgacatctgcgcagcggctactagctccattgacttcaaatcgggccttggccgaggctcggttcaggtggcccggaatggatccccacaaattgaatgctcatgatcgaggtgatgaacgcccactctattgtcctacgcccggttgtatccagcgagcaattgaaggtgctgcgcctgttggtcgaccaggccgagccactcatcatcgacgggcgcatcttgtacgaggcatgggacaggctgcaaacagcccgtccggcccgctagaaaaaatttttagggcccgctccgcacatcccggtctgtacccacaccttcaagggtgtgaagggaataaaaacacacctaacaacaactttgtttcatgatttggcgcgtcggacccttcctgaccgatgtcgtgcgcaacaatggacccatgagttcgcctaccaagatgcgccggaagggaacacgcggcccgaaacctcgcagcgacgaggagctaacggctgtgatgtgccgcatcccagagtcagtggccgaacgtgtcagcgatatggcttgggagctgaggctctcccgatccgatcttgtgggctggtcggccctctatgcactcaactcgatgctcagacagcgcggagaggacacgattccggttccggagtatctggacaaggccgtgctcactgcgttgtatcccgatgggttgcccttcgacgaggacaacgaggagccgggcgagaatgccgggcaggaggagcttgcgatgactggatgagcccgaacatggttgaaggccgccccgccaggcgaccttcaatcaatggtttcggttgtcagctgcagccacccttgccaggtgctgtggttcttctccagaggaggagggaccgccatgaagaccaagaagacctagaagatccaaaagaaccggtttcagcttttgcttcggtcttcatggtagctgatagcccgcgtcgttggaagtgcgacgacgccgatcctcatcggtatcgcaccctgaaacagggtgttgaacatgaagggttgaccgctatgtcaagccatgagacgccctcccggagggcgtcatgaccgctttaattcaagctctgccgacagctgaactgtctgctggacctggtgctagcagtccagctagaccctctgctgagggcttcatcaagattcatcacgacctcattagtgcgggcgtgtcggggaacgcgatggcgttgttcgtcgcgttacgtaaccagcccggctgtgatcagtggacccgtcactcgtacctgcggctagcccaatggtgcggctgggatgggctgtcggaggcggcgggctgtaagcgggtgcagcgggccgctgctgagctcgctagcggtggttggctggaatcgcgggtcggccatgatcgtcgcaccgctaagacgctggtgtggcatcggttgaccagccccgacaccgaccgctgggagcaattgccgcggattgtgtgggcgaggatctgccagatcgccggggagacgtcgggagagtgggtgaggcattggctggtgtggcggatgctggccggtcgtactggtgtggctcaggcccctacgaccatcgtggcccggttcctgggctgttcttcgcgccaggtctcccatatccgtggggctctcgttgatgccggtctgctcggctgtgacgaggtgtcgggggcggcgagccgggtgtggttcccctcgatggccgaggagtgtgcagcggatcgtgaggtggtcgatggggccgtcgtcgatgctgaggtgggctctggtgaaggtgtcgaggagggcggggaacccctgtcgattttgtccacccacccctgtcgattttgtccacccacccctgtcgattttgtccgccaagtattagacaaaccattagacagtgaattagaccctgggtcgcgtcagcgtgttagctcaccaacgcgcgcgcgcgcggcggccgagccgccgaagccaacgaaccccacaccaccaacgcctgaaccagcagcccccgcttcagacagtcctgtgtcagcgcacgctgatgaggctgccgagttggcgtggcagttcgtggggtggtgtcctcagctggtaggggcaccaaagaaggtgcgtggccagctccgtcagatggttgccaagcagatccgtctccatcgtgcctggctggatgtgccggcgttgactgttgccgctgagcgagtccgggaaatcggggcgctgggtgatcggcactgcgagatcgttcgagaaacgttgcatggcgtgatcgccgaccgcaaggcagctcccccagccccctcaccctcaccagacgaaggagacacgactgtgtggatttacaaagaccctcatgagactcttgacgagtttgcggccaggactgagccctctcgtgtgtgggaggtctccgagcgcgatgacatggctggcgggatcgccgtgaacttgctggcggctaagccggatgatccgatgggctggctgactcgccggcaaaccatgctgatggtccggttcccccaagccgtcgacgaggtcgtagagatgtgtcacatcgtgcgcgccgccttggaggccgacatggccgccggaacccggtgggaggaccgatgaggtcactgcggcgaaacatcatggttgtggctggtgtgctcggcgtcgcggtagcggcgggcccgaccttagccaggtcgttgccgtttgctgccgacacgacaccgacgagcagaaccgctactgccccggctacggtcggtgcgggggccgctgctggggcgttgaaccgtctgccagtcaaaggcaaagcagcgatgaccggatacagccggactcaattcgggcaggcgtggaccgatgacaccgaccgggaactgacccgcccctggggccacaacggatgcgacacccgcaacgatgccctggcccgcgacctggtcgaggcccacctgaaacccggatcacgatgcgtggtcgcctctggtcgcctccacgacccctacaccggggccacactcgcctggcggcgcggccggcacacctcaacggcagtccaaatcgaccatgtagtcgccctcgggaacgcctgggtcaccggggcccaacacctcccagcaccgacgcggcgcgctcttgcgaacgacccactgaacctggtggccgtcgacgggcctgccaacgaagctaaacgcgacggggacgcagccacctggctaccgcctaacaaggcctaccggtgcgactacgtggcccgccagatcgcagtcaaaacgaaataccagctctgggtcacccccgcagaaaaaaccgctatggcgcgggtactagaccgctgcccagcccagacacttcccacaggagccacacgatgaccacccattggacccccgaacaactcctagaacccggaatcggagtcatcctcgacaccgaaaccaccgacctggacgggcgcatcatcgaaatatcgatcattgacgcagcaaccgggacagtcctgatgaaccaactcatcaacccccaaggagccccgatctacgccgaggcccgcaccgtccaccacatcagccccgacgatctcgcgacagcccccacgttcacccaggtgtggccccggctggaggatgtggtggccgatcgggtcgtcatggcctggaacgccccctttgatcagggacgtatcgaagccgagtatggcctcgcagggctggatgctccggcgtggccgtggtgctgcctgatgcgtttagaagcggccatgatgggctgccgatggcggcgactagacgggccacaccggggcctcggcgacgtgatagcagccaggcagaggcttatagcgttgcagcagatgccgtcgatgccagccaccgcctagaacaccagcactgacaggcgcccgagtggattggggttggatcaggcaggcagataggtgtcgagggcgtcgcggatgacctgggaggcgctggtgacggtctgggctgcgtaggcgtcgagtcgggcgttggtgcgtgcgtcgaggcggacctgacggcgaggtgaccgcccctggccggtagcgcggtctgagccgagtgccggccgtcctcggccgaggaatgcgcggctggcgcgcgcggcgtccttgccgtggaacaccgggctggtttgcggggtctgggttgcctcgtcactctcagcccactcggccagagcgtcgacatcgaacccggcaggggtggtgctcatgctcgctctccgttcagcttggtgatggtcgtggctcgcctgatcgtttcgccacggcggcaacagggagcggctgggtgtggggcggggccgggctgggccc

SEQ ID NO: 189 - DNA, 15010 bp, Propionibacterium acnes
  source 1..15010: mol_type = genomic DNA
ggccgccaagaaacccaacgccagcgccgcagcaatcgccgcacgcgcacccgtagcccacgcccctgccgtacgtcccctcatcatcttgacgaccacgcccacaccggcgcacgtcgtcagcaacgtcaacaccgttccaccccagctgtccgctcccagcggggccaaaaccttgtcgtggatgtcgttctgtaaccccaccagcgggccggtaatccacccgacccagctcatcgccacggtccagtccaacaaccggcacagcaacgcaatgaccatcaggtacgtgttccaacacatgccaataatggaggcccacatactcttcagcggggccgtaacgccaccatcgtccatcgacatctggtactgaaacaagtgaataccgttggagtcagtcacattgaaaccgtcacccatccagcccagccccgggcccgatgccatggcaggcacactgctcagcgccaccaccagaaccagcgtggtgacgatgatacggaaccgccgctccccggccccggggcggcgtggatgacggctcacgctgtctcccggtcgtgctcgggcgggttggagctggcggcttcgcggtggggagcgtaggcaggtctcagtagtcgaatttcaccgacgttgccgtgttggtcggcgtacaggccacaaccggggcctccggggttgagggcaatcttgaccaggtcagcgaactcttcaggggacgttttagggtccacgcccaggaactcgacacctttctgggcgaggttgatgttgtcgcacagcaacacgatgcgatgctgaatgaggttgcggacggtctcgttggggtaatcggcctcggggtcgtgggagccggtgataagccaggcgttggctcggcgggattcgcgcacgtactcgtcaatggcgtgggaggcttccggcgaggacgacatgtgatgaaactcgtcaacgatgaaagcggcgtcgcgggcccggtcgctgaagcacaccaggcgagccagacgggcaatgagcgcgtagagggctcggccaaacaccttgtgcgggggcagctgccgaaacaaatgttctgacagcatctcctcggcgttaggaagagcgatgccacaagtgccaatgatgaggatgtcggcgctcaggtcggcgggaggaaggtccgggtcaaagatggccgaagctagggaggccgagttctcgatgtcagcgaacacggcaatcctgtcagcgatcgcggtggcctcgggaaggtcgcactcctcggccaggtggcgggccaaacgcccacacgaggtgatctggtggtcacgcatgtaggccggtttgaggaccttggccagcgtggtcccggccacaccgatggtctccaagttaagcaaggtcagcaagaacgactgggcgacctgcccggccatctccgggggaaggatgcgcagcgggtccagcgacagcttggggtgggccgtgtcgacgatctggcgtctaaccccgtcgatagagttgacaaaggttacccactcccgctcatcggagttgtcggtggcaataatgcgcccgccccgggccgcgatggctgcgcacagccgcttctcggccatcgtcttgcccgcgcccatcttgccgatgaacgccaccgtgttgcctttctgatcctgagtgtcggcatgcaaatcgaggtaggccagcgactgcaacggggagcctgtgaccacagccaacgggatgccggtggtacggcccaaccggtactcgaccaccgggatagatgcggcgaacgcggaggcgtgagtcagctgacggtaggcgttaagcgaggaggagaaccggccaccgggccgggcagcccacagcaagtcctcctgacggcccacgggacgcacccacgtgaagtcaccgaacaccggatcattgacgaacgctcctgccagctcctcggtggtctcaaagtcaggagacgagacagtgacggtgataagagcctggatctcgacctcacgctcatcggcggccagctcggcgttgtagtcgacgagcacctgagcggaatgctcgatagacatgagggtcgaagcctgggtcatctcaccgccctcaacattgtcgagctggtcgacggtttggcggatggcccgctgatttttctgcatcgcagcgtgacgggtccgggccactccccggatcgccacgtcgaccggcacgccagtgtcgtcgatacggcccaggaactcgtaggcaggccacgtcatcgtgcggggcaccttacccagcacgatatgggactggtagacggtctcgccggtgtcggcaccgattttgaggacgcgacgattccacgcctgagccgtccgggacatgtgggagactcgcttgtcatcctcgctggccagcaggtcggaggtcgcggcctcatcgatgaccaactcccccagcgcggcacgtccaacctcatccatgagggcgattccctcgccaggggcatcatcacgcaaccgggtcgggtggcctgacaggtgctgccgaagccagatctgttcatcaacggtgaccgggcggggttggaacgctgccggcagtttcgcaccgaattccttagcctgacggagggcccactcccgtgcgacacggccaggagcggtggtcataagtccggcggcttcggtgattttgttgagggcggcggtccaggcggtgtgggtgcgtattttctggtcttggttgagtttgatcgataggaaccacacgcgccggcctagggatgcggtttcaggctggtcgagggtggcgtcgatttcgtcggcccacacggggtgttcgctcaggtcgaggccggcggccatggcgtcgacgatttctgtggggtcggtccaggtgagggctccgttgaggcagaactcgtggcgggcgaggtggcggaataggtcgcggtgagctgcggcgacggtgagggaggcgttctcggtgacgggtcgctggaggggagtaagtcgccaggtggcccagatgtcgccggtggaggtccagacgaggttgtcgaagaggaaccgttcggggatggacatcatgactccttttcggcggcggcgaggaaggcttccaggccgctgcggcgtacagcgttcccggtagggtgcaggggttttctgggggtgggttcagatttcgaatgtgggaggggtttgtggatggtatcggtgtcctcggcgagggcttggtcgagcaggcaggtggccggggtgtcggtagtctcgtccagctcgtcgatcatctcgtcgaggaggttgggggtggtggatgcggcccacacaggtgggatagccggtgcgggtcgaggcggtgtggggaggcggagtttggtttggccccagaggggtgtgtgggtcatgccggcgggagtggtggcggcgtgagtggtcacacgccaccagcccgacagccatgccagaggtgaccaggtccagtcgatgcgaccaacaacgaactgggcgaaccatccggcagccagcgcgaaaatgaaaccgcggatggtcatgcccccgtcgataattttgaagcccatcatcgcggcaggaactacgccgccgacagcgagcacctgatagatcgtgtagggcccgccaggaatccttcgacctgaggaatccttgccgataatgcggggctgctggcgggcctcggtgtgccactgaatatccacgatcagctcttgcccaatccttgcatcatctgtccgaagaattggatcgcgttaccttcgataagccagtgcgccataccacacacaaacagcatggagacgatcttggccaggctcataccgtgtttgaagatgttgaacgcggcaatgcccacgactacgaccatggcgacggctcgcaccgcggactgaccttcacctgccttgatcgtcgtccattcgaagaggttctgcgattccagtggcagcaggaggaattgatcgagcatgagaggttttcctttcaggaagccgaccgggatggtcccggtactgacgggctggacggcacgggtgtgccggccaggggcagaaggcgtgacggctggtcgagggcggcaacctcccagcggcctgcacggctgacaagagtcaggccgtactggctagtccgggtagtggattcgtcaccggtgggctggcatgtcacggtcaccgtgacggtaatcttctgccggtctgaggggggggggacctcgtcaggtcccaccacatgagtggttttcactgatacgcatggggctgggtcaaccgcggtgaaagcggtccctgggctactccatctcgacaggtcgtcgctgccactcagcatcgcggccaagaaacccgaagaggtctgggcagccgggtcagcaggacgaatctccgaggagtccacgtcgggggctgaggccggtgcaggcatggggatctgtccaggtagacgcaaggcgatggccttgccgttggaatcgacgtggaccgggactgaccaggcctgtccgctcccggattggccgcccatggtgaccacggtgacctgccacaggctcggatcagacggggagacggtagcgtcataggcggtgacggtggtgggcgctggaccaggtttgcggggcatgcgcgcatcggtgatcttggccgccaccaggtgttccagattgtccaagtgcccggagtcagaggtcagcagaagagtagtcacctcgaccgcggtggctgaggcgatctgagctgtgcggcggtcgtgatgggtggtgtcagtgctgacagctgtggtgggagcggatgccggggccgccgaacggaccagggcaacggggccgcatgcgactccgcacagcacgagggcaaggaagcctttggtggccatcgatccggtgtggggccagggacccacgttttcctgtgcctgttttttcttggccgaccaacggcgggacttagggttagcggatgcaccttctggggtgcatgctcgtctcaatcgcatcggtcacctccttcactggatgaagggaccaaggaggtgaccgatgtgcggtcgaacccgaaaaagttcaaacttttttctgggtctgcctcaagtacgacagaaggcctgcatcatcacggcgttgtggtagcagatcttgcgtcagcgcaaatgcatgggcctcgtaggagtagctcttaggtaggtcccggtggttgcggccagggcgagggtgtcgggtatgtgtagcgctagtcccgggttcgtggtgtgagggcttttgggtgctgacatgcactacccattgctagacgctgtgctgtggcatggctggacgtctagcagacgggttgacatcacctttaggctggcagcgcccgaggccgcaggccagaggaagcggacagcctaacgattgacgtccccctctcctttccccaacctcctggagtcgatgacccggagatagatcgatgtctatgcatcggtgcatcgatatacctatgtatctgtctgtggtttttagaggccactcccgtcgccccgggccgctcagcgataccgcaaggctgtgtgggatcagctgtgccgctcccccgacatggcagacagcaccgttgcatgagaactgactgacactgtggcgccgcggaggtctcccgcggcgtccgctggggcgagtgcatgcctgtcagctcatcttttatcgtcatgtttccccttgtcagagcggtctttgcaaagtgacaacgtcaggggtcttgacgacaacatcctcgacaacatcgtggcggtggtctgtgtctcgtcagttcaacgcaccggggaaagaggcaccgctgatgttcaccaccacaaacaccctcaacgatgaatgggaccagattcgcgccactgagatcgattggcatgactgccctgaactgatgcactgcatcgacgttgatgatgtgttggccgtcattcctgccgcccccgacgccatcttgggctacctcattgcccgggctcagggcggtgacgagttggccacccgcactatcatccaagcgttcacaggcaagcttattttgatggccacggccaccaaggtgcgccgtactaatgacggcttcaatgatctgttggcgggtctgtgggagacgatcatcacgtacccgttagatcgtcgccctgacaagatcgctgcgaacctcatcctcgacacgttgcaccgggttacccggttttggcgtgctgattcccccgatgaggaagaggctcacggtctggtgcccttccctgacactctcatcgccccagagcccgatgaggacgtcacagctagccaggccatcgccttggcggtggaccgcaactggattaccgaggacctagcccgcctcatgagccatatttactgtgacggtatgactggagctgatgcgggtcgtctgcatggctgcgctccagctacggtgcgatctcgatgccgtgatggtcgggccgtgttgcagcgcaacgccgagacgatcctggccgtctgctgatccctctcttgctcatgcctgccgccaccctacccctacctgctagaaacatagccatgtctccagcaacgcatctagcatatcttctagcaattgatctagctatcatatagctgatgatctagctatcatatagctgtgtctccagcccaaaggacagcccaatggcatgcttgccacaggaaggtgcgtcagcctcccgaaatactggaaggagctttagcgtgcaggacatgaccagtcctattgaccgatccccgttcgaccgcactattgcggtgtggaaccacaaaggcggcacgttcaagacgtccgtcgtggcgaacctgggatacctgttcgccgccgggggcaacaaggtgttgatggtcgacatggatccccaggccaatctcgacattgacttcggtatacccgcgggagaacgtgaacggggcatgggattagccgaggcgctacgtgaggggactgtccttcccccaccgcagcatctcagcgaaaaccttcacctggtcagtggcggcgctgctctcaacgagttcaccgaccccgcatccttagcggccatcctcgaccgagtcaccaccgcacgctacgacctgctagctcaggcccttgccccgctggcctgggactatgacctcatcttcatcgactccgggccggcccaaactctgctgtcccagaccatccttggagtagcccgctggctggtagtgcccacccgcaccgataacgcctcaatcactggcctcgtcgacgttcaagacgccatcgacggggttgcctcctgcaaccctgaccttcaactactcggcgttgtcctagccggcgtgggggcccgggccacccggatcgccgcagataaacgccacgccatcgacacagtgctgggggcaggaaccgttttcgatgcggtcatccactactccgagaaggtgtccgtgctcgcacgccagcagggcaagaccgtcgccgagctagccaacgagtaccacaacacccagcccgcctacacctacctagctaaaggccagaacatccccaacgtcgccaaggcagccgtcagcatcgaaactgattatctgaggctggccaccgagatcagcgaccgcatgttcaccagcgacgagcaggagcctgatcatgactgacgatccgactccatccgagcagaacaaccccaccagcgacgacatgcgcttggccgaagaatgggccaacagcggccgcacagtgggagccctgccgcgccgtcaacggcctcagcgacccacaccccgcaccaccagccaacctcctgtctcgtcccctgacacaccggctccgaaaaaagcccagaagacccccaccagccagcctggccgtcaacggatcaacgtcaccgtctacgttgtgcccgaactccatgagcggctgcgctcccgatcggcggcgacgggggtgacggtctcggatctggtggtgcatgcgttagcgttcgtcgccgatcatgcgggggaggcgatcgccgatgatctgcgcgtcgagacgggccccggcatgggggccggactgttcgatgtgaccccatcgcggccagtaggggtcgccaaaacccagctgggggtgcgaatgacccgccacaacaaggatggtttggaccagctgacccggacgagtggggcccgtgaccgcagccatcttgtgtctgtcgccgtgcgcgactatctcgactccaaccctgtaaagaaaggccgacatgtccgctgatgaaactcctgccgcccggggtgggcgacgctttgatacgaccgtcaagcccaggcgccgtcccatgcttatcgccgccggtatcgccatcgtgatagtcggcgcgctcctcatcactcagttgattcgctccgcccaaaccgagcatcgcgtgctggaagtccacgccgatgtggctcgcggcgaggtcatccgtgacaccgatctggtatcggtgactgtcggccaggtcgacaacgtatcaacggttcccgcagaccagctcgactcactggtcggcaaacgcgccacggcagatcttcgagccggatcactcttgcctgctggggctatcggcccggccgatgtcgttccagctccgggcaagtcgctggtcgggctgaagctagccgccggacagatccctatcggagaccttgctgccgggacgaagctgcgcctgatccagacgtcggcacccagcggctcatccaccaccactgatagcagcaccaataccgatggccagtcgtgggaggcaacaatggcgaccggcaccaaaaagaccgagcaggtcaccttgatcaacgccgaagtgaactcgcgtgatgccgcccggatcgcccaactgacgtcacagggccgtatcgccgtagtgaaggatccgatccgatgagcaccattgttttgaccagcgtctcgggagccccaggggtcaccacgacagcgatcgggctgggcagggtctggccacaatcgagcctggtcgtcgaggatgacacccaccacgccatgctggcgggctacctgcgagcctcccagcacgccgaaccgaacctggccgcagtggcgaacctgacgtcgactccaaccaacgcccaaacggtgtgggaatctatcgccagacccctacccaccgatgacccagtcggcgggctgcgacgcaaaggcatcctcggcccgcccacgccgtggtctcgcgcaggcatcgacccccgatggggattcatgctggccctgtggcggcaactggaggaggctggcatcgacaccatcatcgatttgggtcgcctagccacaccactgacctcaacgccacacctgatcgccgcacccatcgtcgaggacgccgacatgatcttggtgatgatcgaggcgacactacgcgacatcgccggcgcccgcacgatggtggagggactcgctgagcagatgaacttggccggcgcctaccgacgtctcggactgcttgtccaccgtggcggccaggcccgcggcgtcgccgagttcaatgacaaggagatcacctcggcgttacgactcccggtcatcggggccattacccatgacccggccggagccgcccaactctccgacggggtcgggcagcggttcgacaagtcacgtctggcccactcactatcaaaggtggcggccagcctcgtcgatgccataaacaagcgccacgctgatgacgaggaggatctgtgatggccagttttgctgataatccgttcgacaagctgcgctcccaggatgcggcaagagcttcggtagagcaggagcctgatgccggattagcgtcggagttgttttcgacgtcgtcggggtgggccagctctcagcaggtgtcccaagctcaaccggtgatgacccgttcggagaacgtggattggccggttgtcgcggagctagccagtacggccactgatgaggttgaggctgagatcagccggtggagttccactcatgatggggtggcgacgctagacattcgccaggccatcgcggagcctgctattgcctcggcggtgtctacgtatgctgaccgacgccagatcgatgtaggggagacctggcctgatctggtacgccagcgataccgcaaggctgtgtgggatcagctgttcgggatggggcggttgcagccgctgttcgaaatcagcgacgccgaaaacatcatcgtggtgggtaaccatgaggtggttgtcgaccacaacgatggttcccggtcaacgctgccgccggtggccgactcggatgccgagctggaatcccagatcgcccggatggcgaggaatgcgaccccgcggcgagccttcgacgccgatcacaccgatgtgacgatcatgcaccaacagaagttccgtatccacgcgatctcagcggaagtgtcattgcaaccgtcggtggtcatccgccaacatttgctcacccaaatcagtctgggggacctgtcacatcgcggaatgatgccggtggaagtggcccggttcctcgatgaggcggtacaagctggcaagtccatcgtggtcgccggcgagcagggtgcaggcaagacgacgtttttacgagcgttgatccacgccattccgatgcgggagcggttcgccacgttggagaccgatcaggagttgttcgctcatctgatgcctggccgggaaaacacgctggtgctgttcgcccgtgatggtaacggcgaggtggatccggcgactggcacccagcacggcgctatcgagatcgcccagctgattcctcctagcctgcgccaggcgttaactagggtcattgtcggtgaggtgcgcggcaatgaggcctcggccatgttccaggccatgcagtcgggtacaggcaccatgagcagtatccactccccgcgagcctctgaggtgccgtcccggctagcccaaatgatttcgatgggcccggtctacgatctggatcaggccatgctgcagatcggtcattcgatcgactacatcgtctttgttcgtaagcgtgacctgcctgatgggagccggctgcgatttgttgagcagatccgttcagtctcgcctggtgattcgacaactcccagtcttggcgaggtgtacacggctgactcgtggacaggccagccgcttacgccactcatgcctggttcggccgccgatgagctgtctcatttcgcccgagacctggattactgcgaggcccactcatgaacactcccgcactaaccagcgccctcatcgtgaccgggctagggctgatcctgaccatcgacgggctggtcccggcgccgcctcgacctggtgccccgctgagcccggcccaaaggtgggctcggctcacccaccgtcccactggtgcggccgggcgtcgccgggatttgcgttgggggttggctgttcttgtcggtgtcgtgttgtttgtgctcaccgggtgggtggctgcgctggcgctgggccccatcattgtgttgttggcccccaccctgctgggggcggccccaccgaccgatattccgctgatggaggcgctggatcggtgggtgcgtcaggtggctgcggtgctgccacaggggcgagacatcatcacagcggtgcggatctcacggccgcgggccccgaagctgatcgccgggtcggtggatcaactggtgtcccggttggatggccgtatggagccgagggaggcgttccagcggatggccgacgagctggactcggctgaggctgacgcggtgctggcctctctggcgttggcggccactcatccgcggggagcctcgacaacgttgaaggctattgctggcaacatccaacagcggttgaaagtgctgcggcaggtggaggctgagcggtctaagccgcgtaactcggtgcgccagatcacactggtcacgatcgccatgttcggggggctgctcgtgatcggacggtcgtttctggccccgctggcgacccctcccggtcaggtgctggtggccgtggcggtggtcatgtatgtcatcgcactagtgcagatgtatcggatggcgcggccccgtcgacgcacccggatcatggtcaggaggacccgatgaccattactgctttgtccctgctagccggggccatcgtcactgtcggactgctggtcatcgtggcagcattccgcccagccccaggccctgacctggttgccgctctggaggtggtgtcgggtcgcacctcaagcgtcgccgagaacgtcgaccagacccggatcgggcggataggtcgcagcgtgacccgcacattccatgtgtcggtgtccccggccatgcgggccgcactgcgactccaaggcacgacccccgaagcgttctacggtcgacgcctgatctgcgcactgatcggggcgatcctgccgtggctgctcaacgcggtagccatcgcggtaggggcgaattccccgaacctactcatcccttcggcgctgtgtgtggcgttagctggcgctggatggatgctgccggcagcacggttgaaggctgcggccgggcccaccaacgatgactcgttcgaagcgctgctggtattcatcgatttggtcgtgctggaacggctcgccaacgaaacctccgtcgacgcgctcaccaatgcggcaaacatgtcggactcgccgctattcgtccagatccgtcaagtcctcaaccgtgcctccctggaaaacgtcgacccgtggaacgggctagaccggctagccgaggacatcaaactgcccgaactcaccgatgtggtctccatcgcccgcctccaaaacgaaggcgcctccctcgtcgacagtttccgggcccgagtcgccgagttacgcgacgcctacctgctgcgcctgcaacaagaatccaccacgatcacccagcggcttggtttgtggacgatcctgcaagccggctcggtcatgctcatcttgctgggggcggccgccctcacactcatcacagccggataaaccgacaccgtgtcgagcccccatatgggccgcgaacctttcataatgatgcctgtaagcaccacaatattgatcacaacctaacaatgaaggagaaatcatgatgaccgatctcgacctggctaaaaaacagatcacctggctggcggcgcacctgcgttcccggatcgttgacgagcgtggcggtggtagctctaccgtggagacactgatttggattggtgtcatcgtggcgctggtgattggtgtgggcgtcggggtgacggcctatatcaggtcgaagatgcctcactgacgacgatgcgtagcaggttcacaactgatcagcgtggcggtggtagcgcgtcgatggggatgctcctgctgatgcctgcgatcatgctgctggcattcggtgggatcgaggtcgggatgtggtgtcacgcccatcagtcgaccatcgcggcagcccaaagcgccgcggaggctcagcgtgtcgtccatccagctccggggtcggcacaggaggcagcctcgcagatcactagtcatggcggggtgcgtgatacccggatatcggtcagtgatgacggggccactgtcacggtgaccgtggtgggccgggccccatcgatgctggggctgcatcttccggctgtgtcgtcgacagcgtcgatgcccaaggagcgcctgtcgtgaggcgaagtgagcgcggcggagcaagtctaagcgtcgaggtgctcatgtgggcgccgatcgcgctggtgatcatcgggtttgttgtgggtatcggccggatgtcgatggcccaggacgcggtgagtggcgcggctggtgctgcggcccgtgcggcgtcgttggagcgtgatggacagtcggctcagtctgcggcgcagcaggcggcgtcggcgaacctgtcgtccggtgggctggcatgtgcgccgagtgtgagcgtggacacgtcagtgtttgcccgtcctgccgggcaggcgggcacggttcacgccacggtcacgtgtgtcacctcgctgggtcttggattcgggtcccggacggtgcacgcaacggggtctgccccggtagacacctatcgggaaaggagaggctgagatggcccgcgatgagcgtggtggcggctcggtgtcggtgtggatgctgctcatggtgccagtaattctggtcatggccggcctggtttttgacgggtcccgtcagatatcggcaacccaggcggcccaggacgcggcggttgcggcatcccgcgccggaactgatgcggcagcgacaccgcagctagctggccacgacggggcggccgtagcagtccaagcggcccgccaggcactatctgctgccggggtggacgggtcggtgcaggaggacgggtcgaccatcacggtgaccacgtctcaaagtcggccgacagtgttcctgtcagcgatcggaatcagccaggtgaccgggcatgggcaggcccatgctcagcttgtgggaccgggagaacgcccatgacagtgatacgtcgtatcggtgccctggtggcactgctggtggtgatagccggcttaccggccgggctcgtggccgcaggcgccccgctagtaccctcgggcctgtcatgggcccatgtgcggcatctgttggttaccccagacatgaccgggtcggtgctggtgtggctggtcagcctcatcggctggatcgggtgggcatggttcgccctggccgtcgcagccgaagcggtgacgatgctctcagggcagcggctgcactggcacatgcccggccctcgcctagtgcgccgagtggcagccggtctcctcattgccgcgttcgcgggcgcaccggcggccacgtcggcagctcacgcggtcgaggccacccatgtggcggtcgcagctcaggcttccccggcccacgcggccggcacccaggacagccccgccaccacctctcaggccccggacgcctccaccactccgaaaatctggaagacctacacggtgcgggccaacgactacctgtggaagatcgccgagcactactacggtgacg

SEQ ID NO: 190 - DNA, 13200 bp, Propionibacterium acnes
  source 1..13200: mol_type = genomic DNA
aacaacaccgaaccgttccaacccgccctgttcgagctggccgactgcgcatgaggaccctgcacagacgtgattaaatcgaagggctcaaccagtcatcaggagtcccccgtgcgtttgtaccgcgctgttctcgccgacaccgacatccatatcaccatccgtatctggaacactaccgatcgtgactggacctgggccccccttgacacttgggcccccgacccggccccgaccacaccagcccagttagccgatgaacttcaccgtcacggatggatcacccctgaggtccctactaccctcaccgaggtggctgtcatccccgagaactggcaagctttcgtcgagcatgccctcgctgtccggaaccagcaggctgaccaattgcgcgtcgccgagaacatcctcaccgacatcctcggcgacgccgccgacgccggcctgtctgtcaccgctctcgcccgcacgaccggactatcccgagtcgccgtctacaaacgcagcgccaaaaccatcgactccatgagacacgccacccaggccggcggaatcctcaccccctcctgtctcacccacgctgagagaacagcgctcggcctgcccgacgagtaacccatcgtttacatcctcgactggtccctgcgaccagtgaaccgtgcccccactgcgcccacaatgatcagcacacccacggcgatcatcaggtgggcagcactaactgatcccaacgaaccaagatcaaacaagccctgcccgggagcgtcgagcagtccgtgggcgcgaagccatgctccgagattgccaatgatcttggggatcatcttgttcagtagggctatccctccgatgccgacaacgaggaagacgaggatttcttcgcctgcgttgtttcttcctgtgtttgcggtcatgctgccttctcggggtggatggccagccagctgatgaggttgtcggtgatctgccctgagatttggatcagttcgacttgcccggcctgccatgcccgcgatgtgccggccagcaatgatgctgggacccctactgcgcggccacgggatgcaacctcagccaaggcggcgcgtaactcctcgacggtgctttcgatgtaccaactgccgtcagtactagtctcagcggcatcggtggtagcgataagagcatcggtgaggtcgtcgacggcgcggtccagatcagcgatgtccggtagggctacaggagtcatggtgtgtcttccttctagggtgccttcactggtgaagggtccctagccccggccgatgtgcggtgctgtgggaaaaatgcttcccattggtccgtcttagttaggaaacttggcctaagtgctgtcgagggtcgcgtgttcgtgaccggttcgaagacactgccgccttgtcttcttgcccgtggcgcttccgagatggtcagtgggcgatggctaggccgatgagggcgccgctgcacaggctgggcgcccagggaaggaatcgggtggtgtggtgtcggaaccggtcgattagggcatatagggcgatcagggtgaggccggctatgacagtgacctggatcgtgtcgatgccggttgctgcggccggggctgcccacagtggtgtgatgcgcacatcagagaaaccgaatccgcctcgggagatgagccaggcgatcatccacgctgcgaagatgatggcggtagcgatgacagcacgtatcgccgcagtatggtccgagagggcggtaacgactacagccccgatccatccggcccatccggtccacgctaggactgccggtatccatgtggtgatggcgtcaatgacggcaacccatgccccgatggtggctagcagagcccaggccggccaggtgggtgctggggcccacgctacggcggcgatcatggttgtcgcagatgcagcacagacagcgatcaagcttcggaggctgtaggtgtcgcggtagacgatcttgtcgggattggcggtagctggttctggcaggacgcgggtgagggcaggccatcctgcgaccgcaatagccgcgacggcgaccacccacacaatctgttgcatgggtctcatcatggcccatcatcgatgagtatgggtggccgacatggggtcactcgtagaggggatcgaggggtgtgcgggcgagcatggcttcctgtgtgccgagcatgagggtgccagaatcctcgccagccgattcccagtcgacgatgacctggtcgccgtcaacgctggattcggcgatggtcacccattctccgtcgatattgatgagcaccccagcggccagctccgtggcagcaaccgggtgaggtgggttgtagaagcggtcgatgtcgcaggcagggtcgtcgggttcctcgactaccggaggtggggtcgatctggctgtctcggtgtcgtcggccaggtcggctcccaggatgcgctcccattcggggctggttttcttgcccgctgaggccatcgtctcgtcgatctgttcgtcagtgggccacacaaatttctttttggtccaggtcgtggtgtcgggtcgcagctgatccagcagttccaggtcttgcggggagtgggccttgcgggggtcgggggtgtagaagaattggacttccttgggggctgattcgccggataggtaggtgccgcggccgcgtttgccgaacgggatgcccacgccgacgtgttcggagccgaacatcatgcgggctccgtcagcggacaggggtccggtggcggcacgcccggagaagttgtctcggatttcgccgcccaggaactcggcgtcggggcgttgggtccccagatcgacgtggatacggcaggcggctgccatgcgcagcagggagccgatccagccgaaaacggggcattctccgggcatcccagagaccttgatcgttgaccaccagtttttcgcgttgccgtagaactggcggtactcgtcgatgaggaccagcacgcgggtgaagtcggtctcgcgggccccttcttcttcgatgcggcggtagcggtcctccatgagagaccacagccagtggatgagggcgacctggtcggggacggtagtggcgaccatctcgatgttgggccactcccgcaggcccaggtactcgatgcgtttagggtcgatgacgaagacgcgccagttgcggcgggcaccctcgacggcgtcgccgatcatggacaccgtttttccggtacgggtgcggccggccttgagctggtgggccatgacaccggagatgtcccagaaacaggtgttgccgtcctcgtcgacggcctgggggattttctcccagtctggggagtctgggcccggaagggccacgggtcggggcaccatcgagggcagggggtggcggcgggtgacggtgatggtgtcgtgttccaggtcgaagtcgctgcgccactggccgagcatcatcgccgaggtcaccgcggccaggcgcaattggatgttcgggctggacaaatgggcgccacgttggtggtgaatggtgaagccgtccaggttcccccgatcggttttccaggaatcgacggtgaccgccgacccatagatctgagtggctacttctttagcccgttccttgtctcggtccagatcggttttgtcagggtcaggggtcggggcgcggtattgcaggacgaaccggccggccgggatcgttgcggatgtcaccgtgaactctgccggcgaccaggcagccgcggccgcctgggtgagggccattggcatggtctcgacggcagcctcctcgggggggatggtgagggtcaggcgtcgcggatgcgtcttcttgcgattccatgtgactttctgcctcaccggcaccttcgccgccgactgaatggctaggcgagctgattcggcagtttcggtacgccggccagcgcgtagcgcccgtcgtgcgtgaaggctgcccaccacagcacagcccatacacggcagccacgagcgcggatcagcggctgctgcatagcccccggtagctagtaccgcacctgaccagccggccgcgatacttttccacgccggtttcgcgccaccaggaccagcgttatggacggtctgcttcgaggctgcggagggacgagacagcggagtgctggtcatgccgcggcctccttgtggcaggtcatttcacaggcatgccggccagcgatgatgccgtggcgcaccgccccggtagccgcatagaccgcgcacaactcaaacacggggcacccatcgcaggccgccgggttcatgctttctttgtcccacgatggtgggtcatcggtgcacggcacggccaggccatcctgttgagcggcgctgatagcggtgaataggcgcagctgggcgcgaacttggtctggggtcaggttgacggtgcgggctacacgcatggggttccttcctcttcaccagtgaaggttccctagacccggccgatgtgcggagggatttcagtgttttatcgaggtgaccagccagccggtctgcgctgcgggttcaggtaccagggtcagatgcagcatggtgtggtcggctaggggcacggcgaccaggggcccgtcggcgctcgccccggtgagggtgggagttccggccacggtggtggcgggaatctggttgggtttcgcggccatcagggagcccatgagggtcggggcggcgatctggacgagggcgactttgcgggcggcgggatcgcgggtcaaccagccgcgggtgaaggtgagcgcagccgacgtgatatcggggctcagcggggctggtgtggcggcggggtgggccgttgaggagggccatacgcgcggtagcgctggcgacatcgagcgggtcggagtggggtcaggtgtggggcttagggtccgatgtggcgatggggctaccgccccggtggtgggagacgagactggttgggggtggtgttgagggcgtgggatcagggtgaaggcagccaaactggccgggatgaggatgacggccgcgccgacacttcggagcgaggtcatgtgacgatccttcggtagctcgacgggttgccgtagatcttttccacgttgatgccactatgtgggttgtcggcgctaaccatttggcctccaccgatgtagacggccacgtggtgggcagggcttccccagaggatgaggtcgccgactttgagctggtcacgggccaccgcggtgccgactttctgctggtcggcggcggtgcggggaaggctaatgccgatacgccggtacagcgccgaggtcaggcctgagcagtcgtagccgccatcggctttgccgttgccaccccacacgtaggcgtaggagttgttgtcggcgatcgatttggcccatgccacggcttcggccaggttcttcgacacaccggtctcgttagcggccccggtggcacagttgtttgacaggtgccctgtagtagtggatcccactatttgtttggccatggtttcccatttggcgtaggcatcgggcagggctgagccttgcactgcctgagctgcctgcgtcagcggcatcttctgccagtcagcgatgtcgactaaaccgggaatgtggaatccagggccgccggccgatccggggccagcgtaggtgatggtgtggcctttcaagaacgcctcggtggcgtaggcatcattgttgacctgatccagagtcccgtaccagcccggcaggatgcgctgctgaaaggggccggcgtcaccgtcaccgttagccttcgctgaggtagggtcggccccaagatctgattcttgtttggcggtcataatagcgatgaccgctgcctgggtaggcagtttgtcacgctggaccacagtgacgatggtggtcacgagctgcttctgcctggccgtgaggcctccggcacccacagtgcctccggtgacggtacccacgcaagcatccccgccgacactgccaccgccgacgccagagttgtcgtcgagggccccagagcctactgacagcagcggcacaatgatcacggtcgcgggcaagaccgccaggcccgccagcatcagcactgctgcactcaccacggcgatcacgtgagatgctttcaacgctgcccacctttcgctggtttgagggggcgacgcctgctggtacgcacaggcttggttggtccagtccgccgttggttggcaggcctgggtttgatcggcttgctgggacccggtttgggctccggagtcttaggctccggcttcacatgcctaggcacttcggctgcggtgggaggagtcagcacgtggcgtaccggcttggtgaccttctgggcacccgaaacaaccggcttagacaccaccttggcacctttgaccaccggtgcggctgccttcgcgccggccttcttgactgcacgatgcgctttgatagccccggcctcggcccggccaaccctgctagcagtagcatcgagggctctgtggcccgtcgttgccctcaccggtgcatccttgccctggcgggtctgcttagcgatcgccgacatgccgcctcgcaatgccgaaacatgattgtgggcgtgggcgatcgccgacatgccggccgtcgcgatttttgactggccctgcggggcccctgccccagcacgaatctgctggtaagccgccgacgtgccacgagcacccgccgccattcgcgccaccttcgcagccctagtcactcccgtcgacacgccacccgtggctaccgcagcagcacccgagaccacagtcgaggccatccgccttcgacccaatccggtgagcttgcgaccaccgctgcgcaccatccggcgagcaccccgcccagcccactggccgatcaccgagcccctttcggaacgcttgctgcgcatccaatcgttgatcttgtccctcagccccttctcgcccttgtgacgacgccacatggacatcaagaacccgataatccccacgagctcgagcatgttgacaaccatgaccttgatggcgacatcaccgtcagaggcgaaaaccgacttgatgatgagcatgaccacacccaacatcaccatcgacccgacaatgccgatcatcgagtacaagatcgaacacagatcccggatgagcggatctgtgcggccagggatagcccgcaacacgttgagcatcgacatgaacgccgaccacaccaacttgcacacgtagaaccagcacatgcccgcgaacaccagcaggaccacagccaaacccgccaccgtcgacgagtaaaagaagaaccccaccaaccacgaaccatccgcaatatcgccggcgtaatccgacaacccctcatcacagtcaccaaggtcgtcgcgagcatccgagacgtcatcgtaagggccacccttgagcacctcgatgtacttgtcgtggcacttcgcatcaataatgcggccatagttgagctgctgatgaaccggcgccacgaacgagtccacaatgatcgccgacagcttcggatccttcgagtctcccgtcgaggtcatgtcatcaggaatctcgacctcaccagcggtcgccgtcgcaggatcaaccgaactggtaatcatatgagacagcgccacaccgaactgctgggtgcgagccagcggagtagccaacgtcgtcgtatcgcctgcgaacttcgccaccggggccgccaagaaacccaacgccagcgccgcagcaatcgccgcacgcgcacccgtagcccacgcccctgccgtacgtcccctcatcatcttgacgaccacgcccacaccggcgcacgtcgtcagcaacgtcaacaccgttccaccccagctgtccgctcccagcggggccaaaaccttgtcgtggatgtcgttctgtaaccccaccagcggtccggtaatccacccgacccagctcatcgccacggtccagtccaacaaccggcacaacagggcaatgaccatcaggtacgtgttccaacacatgccaataatggaggcccacatagccttcagcggggccgtaacgccaccatcgtccatcgacatctggtactgaaacaagtgaataccgttggagtcagtcacattgaaaccgtcacccatccagcccagccccgggcccgatgccatggcaggcacactgctcagcgccaccaccagaaccagcgtggtgacgatgatacggaaccgccgctccccggccccggggcggcgtggatgacggctcacgctgtctcctggtcgtgctcgggcgggttggagctggcggcttcgcggtggggagcgtaggcaggtctcagtagtcgaatttcaccgacgttgccgtgttggtcggcgtacaggccacaaccggggcctccggggttgagggcaatcttgaccaggtcagcgaactcttcaggggacgttttagggtccacgcccaggaactcgacacctttctgggcgaggttgatgttgtcgcacagcaacacgatgcgatgctgaatgaggttgcggacggtctcgttggggtaatcggcctcggggtcgtgggagccggtgataagccaggcattggctcggcgggattcgcgcacgtactcgtcaatggcgtgggaggcttccggcgaggacgacatgtgatgaaactcgtcaacaatgaaagcggcgtcgcgggcccggtcgctgaagcacaccaggcgagccagacgggcaatgagcgcgtagagggctcggccaaacaccttgtgcgggggcagctgccgaaacagatgttctgacagcatctcctcggcgttaggaagagcgatgccacaagtgccaatgatgaggatgtcggcactcaggtcggcgggaggaaggtccgggtcaaagatggccgaagctagggaggccgagttctcgatgtcagcgaacacggcaatcctgtcagcgatcgcggtggcctcgggaaggtcgcactcctcggccaggtggcgggccaaacgcccacacgaggtgatctggtggtcacgcatgtaggccggtttgaggaccttggccagcgtggtcccggccacaccgatggtctccaagttaagcaaggtcagcaagaacgactgggcgacctgcccggccatctccgggggaaggatgcgcagcgggtccagcgacagcttggggtgggccgtgtcgacgatctggcgtctaaccccgtcgatagagttgacaaaggttacccactcccgctcatcggagttgtcggtggcaataatgcgcccgccccgggccgcgatggctgcgcacagccgcttctcggccatcgtcttgcccgcgcccatcttgccgatgaacgccaccgtgttgcctttctgatcctgagtgtcggcatgcaaatcgaggtaggccagcgactgcaacggggagcctgtgaccacagccaacgggatgccggtggtacggcccaaccggtactcaaccaccgggatagatgcggcgaacgcggaggcgtgagtcagctgacggtaggcgttaagcgaggaggagaaccggccaccgggccgggcagcccacagcaagtcctcctgacggcccacgggacgcacccacgtgaagtcaccgaacaccggatcattgacgaacgctcctgccagctcctcggtggtctcaaagtcaggagacgagacagtgacggtgataagagcctggatctcgacctcacgctcatcggcggccagctcggcgttgtagtcgacgagcacctgagcggaatgctcgatagacatgagggtcgaagcctgggtcatctcaccgccctcgacgttgtcgagctgatcgaccgtttgacggatagcccgctgatttttctgcatcgcagcgtgacgggtccgggccactccccggatcgccacgtcgaccggcacgccagtgtcgtcgatacggcccaaaaactcgtaggcaggccacgtcatcgtgcggggcaccttacccagcacgatatgggactggtagacggtctcgccggtgtcggcaccgattttgaggacgcgacgattccacgcctgagccgtccgggacatgtgggagactcgcttgtcatcctcgctggccagcaggtcggaggtcgcggcctcatcgatgaccaactcccccagcgcggcacgtccaacctcatccatgagggcgattccctcgccaggggcatcatcacgcaaccgggtcgggtggcctgacaggtgctgccgaagccagatctgttcatcaacggtgaccgggcggggttggaacgctgccggcagtttcgcaccgaattccttagcctgacggagggcccactcccgtgcgacacggccaggagcggtggtcatgagtccggcggcttcggtgattttgttgagggcggcggtccaggcggtgtgggtgcgtattttctggtcttggttgagtttgatcgataggaaccacacgcgccggcctagggattcggtttcaggctggtcgagggtggcgtcgatttcgtcggcccacacggggtgttcgctcaggtcaaggccggcggccatggcgtcgacgatttctgtggggtcggtccaggtgagggctccgttgaggcagaactcgtggcgggcgaggtggcggaataggtcgcggtgagctgcggcgacggtgagggaggcgttctcggtgacgggtcgctggaggggagtgagtcgccaggtggcccagatgtcgccggtggaggtccagacgaggttgtcgaagaggaaccgttcggggatggacatcatgactccttttcggcggcggcgaggaaggcttccaggccgctgcggcgtacagcgttcccggtagggtgcaggggttttctgggggtgggttcagatttcgaatgtgggaggggtttgtggatggtatcggtgtcctcggcgagggcttggtcgagcaggcaggtggccggggtgtcggtagtctcgtccagctcgtcgatcatctcgtcgaggaggttgggggtggtggatgcggcccacacaggtgggatagccggtgcgggtcgaggcggtgtggggaggcggagtttggtttggccccagaggggtgtgtgggtcatgccggcgggagtggtggcggcgtgagtggtcacacgccaccagcccgccagccatgccagaggtgaccaggtccagtcgatgcgaccaacaacgaactgggcgagccatccggcagccagcgcgaaaatgaaaccgcggatggtcatgcccccgtcgataattttgaagcccatcatcgcggcaggaactacgccgccgacagcgagcacctgatagatcgtgtagggcccgccaggaatccttcgacctgaggaatccttaccgataatgcggggctgctggcgggcctcggtgtgccactgaatatccacgatcagctcttgcccaatccttgcatcatctgtccgaagaattggatcgcgttaccttcgataagccagtgcgccataccacacacaaacagcatggagacgatcttggccaggctcataccgtgtttgaagatgttgaacgcggcaatgcccacgactacgaccatggcgacggctcgcaccgcggactgaccttcacctgccttgatcgtcgtccattcgaagaggttctgcgattccagtggcagcaggaggaattgatcgagcatgagaggttttcctttcaggaagccgaccgggatggtcccggtactgacgggctggacggcacgggtgtgccggccaggggcagaaggcgtgacggctggtcgagggaggcaacctcccagcggcctgcacggctgacaagagtcaggccgtactggctggtccgggtagtggattcgtcgccggtgggctggcatgtcacggtcaccgtgacggtaatcttctgccggtctgagggggtggggacctcgtcaggtcccaccacatgagtggttttcactgatacgcatggggctgggtcaaccgcggtgaaagcggtccctgggctgctccatctcgacaggtcggtattcccggtcagcatggcggttaggaagcctgaagaggcttgggcggccgggtcggcggtgcgaagctccgaggtgtctagggtgggggctgaggccggtgcaggcatggggatctgtccaggtagacgcaaggcgatggccttgccgttggaatcgacgtggaccgggactgaccaggcctgtccgctcccggattggccgcccatggtgaccacggtgacctgccacaggctcggatcagacggggagacggtagcgtcataggcggtgacggtggtgggcgctggaccaggtttgcggggcatgcgcgcatcggtgatcttggccgccaccaggtgttccagattgtccaagtgcccggagtcagaggtcagcagaagagtagtcacctcgaccgcggtggctgaggcgatctgagctgtgcggcggtcgtgatgggtggtgtcagtgctgacagctgtggtgggagcggatgccggggccgccgaacggaccagggcaacggggccgcatgcgactccgcacagcacgagggcaaggaagcctttggtggccatcgatccggtgtggggccagggacccacgttttcctgtgcctgttttttcttggccgaccaacggcgggacttagggttagcggatgcaccttctggggtgcatgctcgtctcaatcgcatcggtcacctccttcactggatgaagggaccaaggaggtgaccgatgtgcggtcgaacccgaaaaagttcaaacttttttctgggtctgcctcaagtacgacagaaggcctgcatcatcacggcgttgtggtagcagatcttgcgtcagcgcaaatgtatgggcctcgtaggagtagctcttaggtgggtcccggtggttgcggccagggcgagggtgtcgggtatgtgtagcgctagtcccgggttcgtggtgtgagggcttttgggtgctgacatgcactacccattgctagacgctgtgctgtggcatggctggacgtctagcagacgggttgacatcacctttaggctggcagcgcccgaggccgcaggccagaggaagcggacagcctaacgattgacgtccccctctcctttccccaacctcctggagtcgatgacccggagatagatcgatgtctatgcatctgtgcatcgatatacctatgtatctgtctgtggtttttagaggccactcccgtcgccccgggccgctcagcgataccgcaaggctgtgtgggatcag

SEQ ID NO: 191 - DNA, 8556 bp, Propionibacterium acnes
  source 1..8556: mol_type = genomic DNA
tgacagcataacgggcctgcccttgaagggttggactctgcacccatttcagccgggtacgttgccggctgggcgaaggaagcagacggcgccgcgattgaagctgccgccgagcacgtcgcgaagacctcccacgcgattgccgaggcgttgcagctcaccgcacagtgagccccacggggcgaccggctcaccccggtcgcccctcaccccccgacaggggaaccgttcccgccgcctgaatctccatacccctgatacgtactacgcggggtcgaggagtggactcccccaccctcgtgtagtacactatactacacagtcattgaggatagaggtgacgtcatgagtttttcgatccgtttaaccgaccatgagcgccgcttagctgattcctacgcccgcctgcactcgcagtccctgagtgaggctttcaagcaagccctcttcgaccgcatcgccgacgagttcgatctgcaagtagcccgtgaggcactcaccgactacgcccgcgacaactaccagtctcgccccatcagcgagctatgggacgagtgtgacctatgagctggcagatcgaaaccacgagccggttcgataaagaattcaaaaagctagaccgctacacccaaaaactcattcacggctggatcacgaaaaacatcgacaacaccgacgatccccgccgccacggcaagcccctcaccggtgatctttccggactgtggcgctaccgcatcggcgactaccgcctcatctgcacactcaacgataaccgcctcaccatcctcgccctgtccatcggtcaccgccgcgacatctaccgataagccgttgcaagactgcggcgtcgacaccgccgggaccctggcccaggccttgggcctggaggaggacgagagcgaggagcacgccgcctgagcggtcgccggcacttcccataacagcaccggtcccggcggcccggccccgcgtctggtgctcggaccgatgccggcgcctggcctccgacgcccgccggggccagcggctgggctacctcgacgtcgacgtacaacgggccgaacgaaccgtgcgctgatttaccaccgcttccgcacagagaacatgcctctgactaggagaaatgacgttttccacagggcctctattactaatatccctattatctctatccacgcgcgcgagcctcagcgttcaagcttcaggtcttgctcgtctccctcgcgcctcgctgcgctcgttgctactgccgccccacccggcaagccgggtgggttgccatcggaataccgtggaccatcccggcgcatacacccagacggtccaagatccaatccacgctcacccgcgacgccgctaacgatcctcatacaccgtagatgccgttctgagagccttccagacccgcacgtgggtttattgcaccgagacccaaatcccctcagaagcgatcctgaaaccgtctacgccccatttccgacggacgctggacaggctgggcggcttgtctcccgccgcagacatggccctggcatatgcggttgccgactggtgggatcagggattggatcacacggcagacggctggtccaaggcgggtgtgcaggtgcggtgagcggcagacgtgaccggtggggtgcactgtcatggccgggcatctgccgagccaccatgcgggccctggaccaggaggcagcccgctgcgaggactgggggaagacggcggcacggatgggccgtcgggatgcggcggccgaattcaccgagactgcggtgcagcatcgtggacagatgcaccacctcatgtcggcacaaaaagtgtgggtgtcgaccgacatggtgtcggctacactggacgccgcaggagacgtgccgagtttcgaggccgtcgacgtccctgccgccgggctcatgggtttggccagccccctgccgccggttaccctgcagcatccgctgtatctgcgcagcgacgagggtgtgacaaccttcactgatccggttctcgtcgacgcgctgggatggtggatggattctgggcgtgtgcacgtggtgatgtgcacacgcacaccccggctgcccaacccggtttatgcggtggcctccccactgacggtggtggagaaaatcacggtgcccaccggcatcgagttcgagaccatggagtccaggatcctgacccccggcggcgtgacaggcgtctcacggcagggcacacgcatgatgatccggttggcgtcatggctgggtgccgcgtgggtgctcatggcgactccgacggtgtcggagccgcaccctatggatggccggtggggaggcccagcaacggggcagacccggccgcgtgatcgggtgaccgtggtcgacatgcggcccatgaggcaggtgcacaccaccaccgaccccaccggcaggcggttgacgacccggcatgtcgtgcgaggacactggacacaccaaccctacggcccggcccgcagtctccgacgcctgcagtgggtcgccccattcatccgcggccccgaaggggctccgttcgtcggcaccgacaccgtcaccgtatggcgccgctagatacgcgggcgcggggggttgacgaacgatgcccccctctttgtgttgtgatcagtcgtgatcggcgggttttaggtcggggtaggtgtcgagaatggccttgaggacgaggtcttggattgtggtgtcattctgggctgccttgaccttcagtccaacgccgatgtcccgggggattctggtctgcaacttgaacaggtctgcctccttggttttgaacagtttggctgcagggttggcaacgggctgttcttggcgctggcgtccaaggttgcttttctttcgggcggtcatgacatcatctccaacagttcgtcggcaacatcggcgaagaaggcgatagtttccggctcaggggtacagccgtaggcgcgcttgatgacttgacgcttggggatgacgtgatcgaccaactgcgtctgggagtcgttggctagaaggtcgcgaccttccttgaacagggaggtattcggttcagctttggaaagcagcaccacgcgcggggttcctgcggcggcgtcgtgcgtctcccaggtgcgcgccatgtcgagcccggacgtgtcggtggggatgataaccagatcggcggcgcgaatggcggcggtgatgatgtcaccgttgcccggcggggtgtcaatgatgacaacttcttcgggtccggcgacgaggtgctggagcgtcgccttgttggccggttccacggggaaccccaaggggtcggcgttactcagtgtgcactcggcccaggatgatgctgacccttgagggtcggcatctttgacgcggaccatacggcccgtctcatggagagctgcagccagcaggatcgctgccgtggtcttaccgacgccacccttggcgttgataatgctccagatcatggtgacacctttcagtgaggatgcatatcagtttacctgcaaggagtaaagacggcaagcagttatgccgtttctgcggcaagccgtcttgcatccttggatgtatagatagttgtctacttatggttgtggatcgtggtgtctcgtaccaggatttagtgtgctcgctgatatgcacgactttcgggcggcctgatctggcggtggtgccactaacccaggagtctgatccgcaaggtgtcctcgactttgaggaaggggtctctgctttcgtgttgacctaaagtcaacggccctgggcgatcactgaatcctaataactttgtatccttccctgattgcatcttagcatccttgaattcaaacagggatggagccatgctgttttgacgacatggatgcactggggtttggttgttgccgatgcggagcgtcaggcggcccgggacgccgccaccgccgacacgctgcgggagatcgtgggactgctgggccggggcggcgaggtcccgcccgccaagacggggcgtaagacgaccggcaggccggccccggcccgcaagtcgtcggccacgcagtaaaggcagggatccgtccctacgcagagagcggaggcagatcctgggggatccgactcttcggttccgtgatcttcccggagatcttcccggatcccccagggctcatcctgatacggggtccgccgacggaccccgtatcagtgggggcgctgccaccagtgatggcgggcgggtcggtcggcgtctaggccccgcccgatggtcgcctggtctacctcgcaggcccgtgctgttgccgaggccgagaacgtctgcccacttgttgccgattcagtcccctctccgtctgccatgtcgccaacctttcctatctggcgtgctcatggacatgcccgggcacgccctcgctgctcagaggcctgctcgttccacctctggccgcgaaccgtatttctgctgaccactcctcgtgcgtgaatatttgccagccttggccattcatatttggactactctgcaccagatatcggactgggaaacctcttgcacatctctaattgtcatctattcgttgggcgcgcgctgttagatcgtgatcataccaatcagaagacaaagcgacgcccttttgagcggcttttcgaacgattctagaccgcgctatatcagcatttctaccgcgcggccagagtgctacactaaattcctctctgcaatccttaagtccattctttacttcctcatccaatttctgcgacagcatttttatggaagcatcgcactctgactcatcatcaaatgcctcaattgcgtgcgttcgccattcacggcgcgtattatcgtagccgtaatgaagtattacccaccgatccacagaatcatcgttaggatctacaactgtcatgaatggcccaactctcgctctggtgtattctcaattgcagttcagtgactttacttgaccagtcccggatttagtagacgtagacggagagtaccccgccgggaacttgactgacatcactgctgtaccgtactgctttcccgggtggcaaccatcgtaagcagcatttgccgtgacgtacctagtgctctttctctgagtgccggtaatcgccttatatggtacaggtgggtgaatcgtagccgttacggctaccgatgacacgtttgcatcacatgaagctgtggcgacataattagttgtcccattgacatgatgagagtcgtggacatactgtcgaggatcgagagtgcaggttattgttgacgccgttgttctggtaccagctgctttcgagctctttgttgcagttacagtctgcggccctgaaggttttactgacgcgactgatgtgttcgcgtgttttgcggcagtgctttgatttggttgtgcttgtgtagcagttgctgatgtcgccagtgatgcccccattaccatagctgtgattatggcgtagtctttacgcttcattgcgcccccaaataagcatgttagtttgctattttgaataggaaacgagacatcgccatgacttgtcaagggcagaagtagaaagaatcggggggtatcaagaaagatgtgctttcatcaggacgaaagcggatgggtccgttcgacttggtgacgaatgatccggccttgcgtcgcggagaccaggccggcgagtttgtcgagcagggccgccgtggcctcatcgtcgggcacatcactaaagggacgaacaaccatgacggctagggccagaaacgaccggaactgaatcgcatgtggacccccatctggcaccaggcacacacctaccgaccggaaaccctgcaccctgtcgctcccagttcacctcctaatatgcgcctatagtctgtgctagtagacattattttgtgtgttgtttcccatctggcatgtctggccccggacccgccgcgacacgcggtggtggataacagaccaggacccccggaccatagagaccagggggacgagacagtcccccggtgaggatgtctcgatgtgcagatcaggaacagaatcgccgggcacgacccggcgccggtgccggtgcagtgaacccgtggcccatcgactccacgaacgaacgtctcgccttcctcaactggtgttggcggcaaggctactcagcagccatcgtggaaacgatggacgccgcgggagcctacgaccacctcgacgacgaccagaccagcaaccagcacgactaacgccgctcccagcacgggggaaggcggcgcaccaggtgcgccgccttcccccgtgctggtgtctcgtcggcttactggtgggggtcgtaggggaacccgtaggtgtgttccagggccttgcggagaaggtcgttcatagttgtgtgttcggcgacggccttcatcttcagcgccgtgtgggtggcggtgggtagcttgacgttgaacgcggtgatcggggtcttggccgactggaaggtttcagagacactggctccctggctggccgccatttggtcggcgtaacggctggctttgtcggcggcggtgggtttgcggttcttactcacttcagcatctccttgattcggtcggcaacctgggcgaactctcctagatctgttggccgggttccgatggcttgccgataggcgacccgtcgatgaacctccgcatcgagaacgtctaggccctcaacggcggcggccccctcgtgggcatcacggtattgcctggtccaatcggctttgttgaagagcagggcccggcgtgtgccgtgggccacctggtaggtcattagcgctcggtccatgtccaggtcccccgactcggtcgggatgatgaccacatcggcgatgtcgagggctgcggtgatcgtctgagagtcaccggggggagtgtcgatgatgacaaggtcggcgtcgatgtcacggcagcgcctgacgataggggcattagccgggcggacctcgaagcccagcgggtcaccagtctcgaaagcgtcggtagcccatgacgtcgccgatccttgcgggtcggcgtcaagcaagatgactcggtactgagctgctaaggccgttgccaggtagaccgccgtggtcgttttcccgaccccgcccttggtgttgacaatagaaatactacgcataaatacatcattacacatgtgcatcgatgtatctgtatatatgtgtatcggcgtgttgtgagggaaaacccgggccacatacaacgatcccccagccaccacagccgggggatctctcagtaaagccagcaactcccacagaagttgcacccccacgatacccaccacatccgtgtcaagcccccacaacacccaccagcgccctaggcttcccccatgaacattgacatggacacaccaaccgaaaccgaagccgacaccttcgatgccgtcctcgccgacattaaccacatcaaccgcctcaccgccgacgaaatcgagtgctactccatgggagcctgtctcctcctcctcaaccaccaccccttctccgaactccgccaacactgggccgacaaccccaccgacgaaaccacgtggaccctctacggggccatcatcgccgcctccaccctggacccccacctcagcatcgacgccctagcccgcctctaccagctccccctcgacctcgtgacccaagccctcaccgtctaagcgtcgatgagcgggggagaggtagcgcactatcggctaaggaaccccacaaacaccaaacccttgtcactgggaagggtttggtgttatgctggtctcacaactcaacagaggaggtgagacatgggaaatgagtaccagaagtcgctcaaagtcctgttcaagaaactggaatctgagcaaggagcccgcatcgagacccggcgcaaaggatggatgatctacccgccggatacgtcacgatcagcggtcatgatccacaagactccatcagatcgcagagcatgggccaacatgctttccgaactgagacgctcaggattcaccgtctaactcagtgaagggggctggagctccagccccctttcaaccacctcccccggacaccacacaagaaaaggagaacatgatgtggcacgttcggttgtcgcttcgcgcaatcagcgaggacatgctgttcgacgccctggacaccctcgaccccttatccccggtggccacactgggccccgatgagcacaccggatcattggcggtgttcgtcgaggctgactcactgacagacgccatcgagactgcccgcacagccatcaccaacgcatgcaacaccgccaccataaccggcgtagaagcccgccccgaagacgaatgcttcgcagacgttgaccggcccctgttcccgccagtggtcggatacaccgaaatcgctgaaaccgcaggactctcacgtcagcgcatccgccagctcgcaggcaccgccgggttccccgcacctgtcatcaagaccgcggccggcccgctgtttcccaaagccgccgccgagcagtgggcgcggacacgccagcctaaggcaggccgcccaaaactccagaccaccacctcataacacatcccgtgtgctgaacctgtt

SEQ ID NO: 192 - DNA, 3927 bp, Propionibacterium acnes
  source 1..3927: mol_type = genomic DNA
ttggtattggtaggcgatggtgtcaccggttttgttgcggatgacgtcgaagccttcgatgtcggaggggatgtcgtcggcgtcgtagacgacggtggtggtgacggggttggaggccgacatttggccgatggtcacgcgcagcatgtttttcaacgcggaggtgaggattgtcgtggcggtggggttcttgtctgcccagcgtttctcggcgatgtcgatcatgtcttggatggttttgacccatcctcggatgggatcgactttggtcagtttgatccctccaaggaactcgatgggcttagtaacgggcccgtcaggaccgaattcggtgtcccagccttcgtcgatggctagtttcagttcggcggcgtcaacccatgtttcgtgggtggtgccgggcacgttgggccaaaaccatcctgctcgtcctttggtgcgtttgaccggtagtaggccgatgtcgtcccaccaggatggcacggtgaagcggatgtggtagcgggccgggtgccaggggttgttggtgaacaggtcgtgagcttcggtggcgctgagcagagtggcgggtgcggcaccgatctctccggtcactgatccggcatacatgaatcggccgtcgatgtacacgaagttagggatagggccggcaggcacggtggggcgccaaccttgttcgcggtcctcggggttgccgtcgtcgacgcatagttcgtagcggtgctgaggggaggtgtgttggatgagtgcgcccagttcggggtccatcggctccatgcgataggactcgggggtccgtagcttccagaggttgattccttctgctccggggcggtccatgagggcccagtcgcggtcgattctggtggcgatgatgtgggttaattcgcgccatgcccagcgggcctggattggggtgagggtctggccagggaaccattcatcagcgaccagaatgtcgaggttgcggtcggtttctttgtgggtgaaccggcctcgggcgggccgcccggacagcatgaacaggccccgcacgtgccagtcctggttgaactcgcgggtgtgagcgggggtgtcaggcagcagccaggattgaggctggtcggggatgttaccgcagacgatcaggcgtcgggcgttgtggtgtagcgcggttgttagcaggtctgacagggtcgcgtgcttggtgcgccgcccccctagcactggcaggatctcgtttccggccgcgtcgactccccgggcggtgtcgatgtctagccacactgtttcggggtcggggggccgatgtggggcgggacggcgctgctcctggtcgtctctcatggtttcctcctttgggccagggagcggccggcgtcgagggcgttcatgcgctcgcgttgttcttcgcgtagttggtagacccggcctcgtgacactcctgctgcctcggcgatggtggtggccggcaggtggccgatggcggcagcgtcggcaaggacgtcacgccaggccaggtcaatggttcccagctgggctagagcttcgtcgcggcggcgggtggcatcagccactacggaggcccaccctgtggggtggatggtcttgacgacgattcggttgtggcggatggggccccatgcatcagcggggacttgccagccgtgattggcggcggactcggtgatcttgaggcgtcgctcaggtgcgcgggtgcgggcagtgacgtcggtgttccaggtctggactggtacccacgtcccctctcggatgcgttcgatgacgcacgtggtgacctcgtcggtgactgtgatgaccagacgataatctttcccgtctggggtggttcggtagctgggcatgtcaccctcccctatctgtcaaatgagctagacacagtgtctatttaatttgacgcaaagtcaagtgcattagacgcctttgtgtggatccgccccaccagacaaacactcgcgcctcatgacccgccgcgaagccttaacgaaaccaaaccgcttatagaaccgctccgcagcgctccccgagggctttagctccaaggtaagaccttgctcgtcggcccattggcagacttgtgtgaggatctgtgagccgtagccctgatttcggggggcggcatgcacgcacatcagcatgtgaccatgacggcgggtcggcgggctgacataagccccaccacgccagtccggtgtgatctgccaacttcgccatgccgcagcgcgccagcggcgggcctcggtagccaccatgatcaccatgatgatggacagggttacgacgccgactatggtcagctcactccagccaggccagttcccggagatgatccagcctcccagcgcccagatgatcatggcttccacgcccgccgcaatcgggacgagtggggcagtacggatgcggcctgccatgatctcggtgatctcgctgcgatgccatgacaaggagaattcccacgactcttgaatcatgctgatgtgtgaacggcttcctcggcttcgccctgccatagcttctctagacggcgctcggctagctcgtcggggcacggcgacagcctgccgcactcggagcagaccccgaagtggcgcgagagagtgatgaccggctcatcgggagcatgaaccgattcaacgaccgggtgctgctcatcggtgagtcctgaggcgtgaccaatctcggctagacggaggtgaaccataccgtcgtagtagtcgaggccttcaacgtggaacgggtaggagccgtccgcggtgtggcctgcaaccaggtccccgacttccagctgactggcggtcatggttcgcaccggcggcagcggggtccgggtcgcgttgatcctcatggtctctccttgcttctgcgccttcatagatgaaggtgccacagccggggttgatgtgcggaaccacagccactttttcaataaatccatcaccacggtctcaccccttcccaaatgtgtaaaccgtggtttacgctttaaggcatgatcgaacacacaccgacacccgccgcgcctcgcgtggccatcatttcccctagcgggccaccacggttcttggccgagcctcccagcgccgcgctgcgacgccatggtcggacccgcatgaggtcccttcccctatcccctcacattcgcgcctgggtctccaccagcggccgtaaacccaatcccatagccaccgccctgatctggatgcataccggagccctgctgccggtgtgggacaccgccgttttgactgggcctgccctcggcagacgtgtgcgccctctcagcagtgacgccgaactgacctctcggcggtggctcgaccaggttgccgaccatcccggctttctcgacacccttatcgaggccgcccgcatcaccgatggatggcatcacgcgacgcctccgcacattcaggccccttaccggacccttcatcagtgaacggaggtacaacgacatgaccagcgacattgacattgaccggacccacaaacccgacgaccgcgccgaggctcctctttaccggtcctgggccaggagactcgtgcacgtctccgggatgccctggcgtatcgtcgccgccttggccggggtctcccccacctccatgcaccggcttctattcggccgcaacggtcgacccgtggaatggatcggcatcaatgatgctcgcgccctgatggatatcggcatcgatgatctcgcctcagcgtccaccgaccgtatcccggcccgcgaatcccgcgagctgttggtagccctgcacaccctcggctggaccgatgagcatctaagccgctggctgaccagttccgacctcgacctgaccaccgcccccaaagccctctacgtcactcgactatccgccgcccgcatccaggccacctacgacatgctcatcagccagcccgtccgccgctgcggcc

SEQ ID NO: 193 - DNA, 2076 bp, Propionibacterium acnes
  source 1..2076: mol_type = genomic DNA
tggcgaaacgatcaggcgagccacgaccatcgccaagctgaatggagagcgagcatgagcaccacccctgccgggttcgacttcgacgctctggccgagtgggccgagagcgatgaggcgacccacaccccgcaaaccagccccgtgttccggggcaaggacgccgcgcgcgccagccgcgcattcctcggccgaggacggcccaccctcggctcagaccacgccaccggcgagggccggtcgccccgccgtcaggtacggctcgacgcacgcaccaacgcgcgactcgacgcctacgcagccgcaaccggcaccagcgcctcccagatcatccgcgacgccctcgctgactacctgcccgcctgatcccaccccaatccactcgggcgcctgtcagtgccccctcttctgggtggtggtccggggcgtcaccgccccggaccagttgggtagtcatctcagttgaaataagcgattagtgatacgcccctcatgctttccggtgctgtcatgagcgtctgacaacagcgacacctcggggcagccgacggacagtcctctggctgccgctctgatcccatgcccacggcacgaaggtgtcggacagctcggtctcgtcatgtgcccaaatagcgtcgtgggcctgtcgccaagcttctcgggagccccacacgggcacgaccgggccacaccggtgtcctggtctccagtgtcgcgacactgtcgatttcggtacgtgcaatgcggcggcggtttgacggatcgacatcccagactcccgcgcgtcccagatcgccatgtggagagtatttgcctccagtgcggccgccacacttgcacgctctcgcgcacgctcgaatgcccgcctagtgctctcaaatgtcgtcacgacgcctccccctgaaaatactcagggtgtcccacggtgggacaccctgagtatttcataccccaactcgcctcaccacacgtcgacctcgacaccgatcaagcgacccgtatcagcgacattgccgtaccgctgccccgcctggtcctccagccacgacaacgcatcccgaaacagcccgacgtcttccaaagctaaaccacagtcgtagccgcccttgtcccccaaccgcacaatctggcgctcccggtggcctccctcgtcgacctcgatccacagtttcgcgtgcatccgctggcctcggccctctgacaggatctcggtgagcaggtcggacgcctgccctcgcgcatcctcgttactgcgggggaattggagtatgtgggaggaacggtggtggggcaggtttgtgacctcgtgacgcagcaggttgcgcttgtgcatctgccgttcgagacgctcgggctgacctgttgacggggttgagccgtggcgccgcttcctcggcggggtctcgatccgttgctcttccggcggttcggcgtcaggttgtggtgcgcgatctcccctaggacgggggggctcgccacctatatccgagggacgatgagacggccttccacgcttgctgcgcactttcgcagcccgccccttgcggtcacatcgacgcggcggcggagtgacgtcctcaccgcgcgctaactgcgtcaacgccgccaccaggttggtgcccggtttcagccctttcagcacgaaccgcaccaggcgggggtctcggccgattcgtcgggcaatctcggcttggctccacccttcggctaacagggtgcgcaacaagtcttgggcccggttatcacgctcagtcactggtcgcctcctcggggagtcctgcctgctcggcctgctctgatagagcagcccgttccgatccggtctggggcgctttcaggggaccgggtaggacacctttgacacgcagtcgcccgtccttgccgtcgtcgccgcccccctgggccacagggagcgcccaggggggcacgttgctggtgtagatggcgtcgccgtggatagccagcagggtgcgggagttcatgcgtagtgctcctcccttggttgtggcgttttttccggtggtggggtcggcgatgggtgtgttgagggtgcgtacgcgggacagggcccagata

SEQ ID NO: 194 - DNA, 13067 bp, Propionibacterium acnes
  source 1..13067: mol_type = genomic DNA
ccgaaacgttccagcccgccctgttcgagctagccgactgcgcatgagaccccacacaaacatggttgaatcgaagggctcagccagcagccagttaccaggagtccccgtgcgtctataccgcgctgttcttacccacaccgacatccagatcaccgtccgcatctggagcaccaccgaccacgactggacctggactcccctcgacacctggacccccgacccgaccccgaccacaccagcccaactggccgacgaactccaccgacacggatggaccacccccgaggaccccaccaccctcaccaaggtgactgtgatccccgagaactggcaggccctcgtcgaccacgccctcgctgcccgaaaccaccaagccaaccagctgcgcgtcgccgagaacatcctcaccgacatcctcggcgacgccgccgacgccggcctgtctgtcaccgctctcgcccgcacgaccggactatcccgagtcgccgtctacaaacgcagcgccaaaaccatcgactccatgagacacgccacccaggccggcggaatcctcaccccctcctgtctcacccacgctgagagaacagcgctcggcctgcccgacgagtaacccatcgtttacatcctcgactggtccctgcgaccagtgaaccgtgcccccactgcgcccacaatgatcagcacacccacggcgatcatcaggtgggcagcactaactgatcccaacgaaccaagatcaaacaagccctgcccgggagcgtcgagcagtccgtgggcgcgaagccatgctccgagattgccaatgattttggggatcatcttgttcagtagggctatccctccgatgccgacaacgaggaagacgaggatttcttcgcctgcgttgtttcttcctgtgtttgcgatcatgctgccttctcggggtggatggccagccagctgatgaggttgtcggtgatctgccctgagatttggatcagttcgacttgcccggcctgccatgcccgtgatgtgccggccagcaatgatgctgggacccctactgcgcggccacgggatgcaacctcagccaaggcggcgcgtaactcctcgacggtgctttcgatgtaccaactgccgtcagtactagtctcagcggcatcggtggtagcgataagagcatcggtgaggtcgtcgacggcgcggtccagatcagcgatgtccggtagggctacaggagtcatggtgtgtcttccttctagggtgccttcactggtgaagggtccctagccccggccgatgtgcggtgctgtgggaaaaatgcttcccattggtccgtcttagttaggaaacttggcctaagtgctgtcgagggtcgcgtgttcgtgaccggttcgaagacactgccgccttgccttcttgcccgtggcgcttccgagatggggtcagtgggcgatggctaggccgatgagggcgccgctgcacaggctgggcgcccagggaaggaatcgggtggtgtggtgtcggaaccgatcgatgagggcatatagggcgatcagagtcagcccggcgatgaccgtggcgtggatcgtgtcgatgccggttgctgcggccggggctgcccacagcggtgtgatgcgcacatcagagaagccgaatccgcctcgggagatgacccagacgatcatccacgctgcgaagatgatggtggtagcgatgacagcacgtatcgccgcagtatggttcgcgagagcgatcatggccacagccccgatccatccaacccagccggtccaggcgagggctgccggtatccatgtggtgatggcgtcaatgacggcaacccatgccccgatggtggctagcagagcccaggccggccaggtgggtgctggggcccacgctacggcggcgatcatggttgtcgcagatgcagcacagacagcgatcaagcttcggagactgtaggtgtcgcggtaggcgatcttgtcggggctggcggtagctggttctggcaggatgtgggtgagggcaggccaccctgcggccgcaatagccgcgacggcgaccacccacacaatctgttgcatgggtctcatcatggcccatcaacgccgaaaatgggtggccgacatggggtcactcgtagaggggatcgaggggtgtgcgggcgagcatggcttcctgtgtgccgagcatgagggtgccagagtcgtcgccggccgattcccagtcgacgatgacctggtcgccgtcaacgctggattcggcgatggtcacccattgcccgtccatgtcgatgagcatcccggcggccagctctgtggcggcaaccgggtgggctgggctgtagaggaggtcgatgtcgcgggcagggtcgtcgggttcttcggttacctcgggtggggtcgatctggctgtctcggtgtcgtcggccaggtcggctcccaggatgcgctcccattcggggctggttttcttgcccgctgaggccatcgtctcgtcgatctgttcgtcagtgggccacacaaatttctttttggtccaggtcgtggtgtcgggtcgcagctgatccagcagttccaggtcttgcggggagtgggccttgcgggggtcgggggtgtagaagaattggacttccttgggggctgattcgccggataggtaggtgccgcggccgcgtttgccgaacgggatgcccacgccgacgtgttcggagccgaacatcatgcgggctccgtcagcggacaggggtccggtggcggcacgcccggagaagttgtctcggatttcgccgcccaggaactcggcgtcggggcgttgggtccccagatcgacgtggatacggcaggcggctgccatgcgcagcagggagccgatccagccgaaaacggggcattctccgggcatcccagagaccttgatcgttgaccaccagtttttcgcgttgccgtagaactggcggtactcgtcgatgaggaccagcacgcgggtgaagtcggtctcgcgggccccttcttcttcgatgcggcggtagcggtcctccatgagagaccacagccagtggatgagggcgacctggtcggggacggtagtggcgaccatctcgatgttgggccactcccgcaggcccaggtactcgatgcgtttagggtcgatgacgaagacgcgccagttgcggcgggcaccctcgacggcgtcgccgatcatggacaccgtttttccggtacgggtgcggccggccttgagctggtgggccatgacaccggagatgtcccagaaacaggtgttgccgtcctcgtcgacggcctgggggattttctcccagtctggggagtctgggcccggaagggccacgggtcggggcaccatcgagggcagggggtggcggcgggtgacggtgatggtgtcgtgttccaggtcgaagtcgctgcgccactggccgagcatcatcgccgaggtcaccgcggccaggcgcaattggatgttcgggctggacaaatgggcgccacgttggtggtgaatggtgaagccgtccaggttcccccgatcggttttccaggaatcgacggtgaccgccgacccatagatctgagtggctacttctttagcccgttccttgtctcggtccagatcggttttgtcagggtcaggggtcggggcgcggtattgcaggacgaaccggccggccgggatcgttgcggatgtcaccgtgaactctgccggcgaccaggcagccgcggccgcctgggtgagggccattggcatggtctcgacggcagcctcctcgggggggatggtgagggtcaggcgtcgcggatgcgtcttcttgcgattccatgtgactttctgcctcaccggcaccttcgccgccgactgaatggctaggcgagctgattcggcagtttcggtacgccggccagcgcgtagcgcccgtcgtgcgtgaaggctgcccaccacagcacagcccatacacggcagccaccagcgcggatcagcggctgctgcatagcccccggtagctagtaccgcacctgaccagccggccgcgatacttttccacgccggtttcgcgccaccaggaccagcgttatggacggtctgcttcgaggctgcggagggacgagacagcggagtgctggtcatgccgcggcctccttgtggcaggtcatttcacaggcatgccggccagcgatgatgccgtggcgcaccgccccggtagccgcatagaccgcgcacaactcaaacacggggcacccatcgcaggccgccgggttcatgctttctttgtcccacgatggtgggtcatcggtgcacggcacggccaggccatcctgttgagcggcgctgatagcggtgaataggcgcagctgggcgcgaacttggtctggggtcaggttgacggtgcgggctacacgcatggggttccttcctcttcaccagtgaaggttccctagacccggccgatgtgcggagggatttcagtgttttatcgaggtgaccagccagccggtctgcgctgcgggttcaggtaccagggtcagatgcagcatggtgtggtcggctaggggcacggcgaccaggggcccgtcggcgctcgccccggtgagggtgggagttccggccacggtggtggcgggaatctggttgggtttcgcggccatcagggagcccatgagggtcggggcggcgatctggacgagggcgactttgcgggcggcgggatcgcgggtcaaccagccgcgggtgaaggtgagcgcagccgacgtgatatcggggctcagcggggctggtgtggcggcggggtgggccgttgaggagggccatacgcgcggtagcgctggcgacatcgagcgggtcggagtggggtcaggtgtggggcttagggtccgatgtggcgatggggctaccgccccggtggtgggagacgagactggttgggggtggtgttgaggacgtgggatcagggtgaaggcagccaaactggccgggatgaggatgacggccgcgccgacacttcggagcgaggtcatgtgacgatccttcggtagctcgacgggttgccgtagatcttttccacgttgatgccactatgtgggttgtcggcgctaaccatttggcctccaccgatgtagacggccacgtggtgggcagggcttccccagaggatgaggtcgccgactttgagctggtcacgggccaccgcggtgccgactttctgctggtcggcggcggtgcggggaaggctaatgccgatacgccggtacagcgccgaggtcaggcctgagcagtcgtagccgccatcggctttgccgttgccaccccacacgtaggcgtaggagttgttgtcggcgatcgatttggcccatgccacggcttcggccaggttcttcgacacaccggtctcgttagcggccccggtggcacagttgtttgacaggtgccctgtagtagtggatcccactatttgtttggccatggtttcccatttggcgtaggcatcgggcagggctgagccttgcactgcctgagctgcctgcgtcagcggcatcttctgccagtcagcgatgtcgactaaaccgggaatgtggaatccagggccgccggccgatccggggccagcgtaggtgatggtgtggcctttcaagaacgcctcggtggcgtaggcatcattgttgacctgatccagagtcccgtaccagcccggcaggatgcgctgctgaaaggggccggcgtcaccgtcaccgttagccttcgctgaggtagggtcggccccaagatctgattcttgtttggcggtcataatagcgatgaccgctgcctgggtaggcagtttgtcacgctggaccacagtgacgatggtggtcacgagctgcttctgcctggccgtgaggcctccggcacccacagtgcctccggtgacggtacccacgcaagcatccccgccgacactgccaccgccgccgccagagttgtcgtcgagggccccagagcctactgacagcagcggcacaatgatcacggtcgcgggcaagaccgccaggcccgccagcatcagcactgctgcactcaccacggcgatcacgtgagatgctttcaacgctgcccacctttcgctggtttgagggggcgacgcctgctggtacgcacaggcttggttggtccagtccgccgttggttggcaggcctgggtttgatcggcttgctgggacccggtttgggctccggagtcttaggctccggcttcacatgcctaggcacttcggctgcggtgggaggagtcagcacgtggcgtaccggcttggtgaccttctgggcacccgaaacaaccggcttagacaccaccttggcacctttgaccaccggtgcggctgccttcgcgccggccttcttgactgcacgatgcgctttgatagccccggcctcggcccggccaaccctgctagcagtagcatcgagggctctgtggcccgtcgttgccctcaccggtgcatccttgccctggcgggtctgcttagcgatcgccgacatgccgcctcgcaatgccgaaacatgattgtgggcgtgggcgatcgccgacatgccggccgtcgcgatttttgactggccctgcggggcccctgccccagcacgaatctgctggtaagccgccgacgtgccacgagcacccgccgccattcgcgccaccttcgcagccctagtcactcccgtcgacacgccacccgtggctaccgcagcagcacccgagaccacagtcgaggccatccgccttcgacccaatccggtgagcttgcgaccaccgctgcgcaccatccggcgagcaccccgcccagcccactggccaatcgccgacgccccttcggaacgcttgctgcgcatccaatcgttgatcttgtccctcagccccttctcgcccttgtgacgacgccacatggacatcaagaacccgataatccccacgagctcgagcatgttgacaaccatgaccttgatggcgacatcaccgtcagaggcgaaaaccgacttgatgatgagcatgaccacacccaacatcaccatcgacccgacaatgccgatcatcgagtacaagatcgaacacagatcccggatgagcggatctgtgcggccagggatagcccgcaacacgttgagcatcgacatgaacgccgaccacaccaacttgcacacgtagaaccagcacatgcccgcgaacaccagcaggaccacagccaaacccgccaccgtcgacgagtaaaagaagaaccccaccaaccacgaaccatccgcaatatcgccggcgtaatccgacaacccctcatcacagtcaccaaggtcgtcgcgagcatccgagacgtcatcgtaagggccacccttgagcacctcgatgtacttgtcgtggcacttcgcatcaataatgcggccatagttgagctgctgatgaaccggcgccacgaacgagtccacaatgatcgccgacagcttcggatccttcgagtctcccgtcgaggtcatgtcatcaggaatctcgacctcaccagcggtcgccgtcgcaggatcaaccgaactggtaatcatatgagacagcgccacaccgaactgctgggtgcgagccagcggagtagccaacgtcgtcgtatcgcctgcgaacttcgccaccggggccgccaagaaacccaacgccagcgccgcagcaatcgccgcacgcgcacccgtagcccacgcccctgccgtacgtcccctcatcatcttgacgaccacgcccacaccggcgcacgtcgtcagcaacgtcaacaccgttccaccccagctgtccgctcccagcggggccaaaaccttgtcgtggatgtcgttctgtaaccccaccagcggtccggtaatccacccgacccagctcatcgccacggtccagtccaacaaccggcacaacagggcaatgaccatcaggtacgtgttccaacacatgccaataatggaggcccacatagccttcagcggggccgtaacgccaccatcgtccatcgacatctggtactgaaacaagtgaataccgttggagtcagtcacattgaaaccgtcacccatccagcccagccccgggcccgatgccatggcaggcacactgctcagcgccaccaccagaaccagcgtggtgacgatgatacggaaccgccgctccccggccccggggcggcgtggatgacggctcacgctgtctcctggtcgtgctcgggcgggttggagctggcggcttcgcggtggggagcgtaggcaggtctcagtagtcgaatttcaccgacgttgccgtgttggtcggcgtacaggccacaaccggggcctccggggttgagggcaatcttgaccaggtcagcgaactcttcaggggacgttttagggtccacgcccaggaactcgacacctttctgggcgaggttgatgttgtcgcacagcaacacgatgcgatgctgaatgaggttgcggacggtctcgttggggtaatcggcctcggggtcgtgggagccggtgataagccaggcattggctcggcgggattcgcgcacgtactcgtcaatggcgtgggaggcttccggcgaggacgacatgtgatgaaactcgtcaacaatgaaagcggcgtcgcgggcccggtcgctgaagcacaccaggcgagccagacgggcaatgagcgcgtagagggctcggccaaacaccttgtgcgggggcagctgccgaaacagatgttctgacagcatctcctcggcgttaggaagagcgatgccacaagtgccaatgatgaggatgtcggcactcaggtcggcgggaggaaggtccgggtcaaagatggccgaagctagggaggccgagttctcgatgtcagcgaacacggcaatcctgtcagcgatcgcggtggcctcgggaaggtcgcactcctcggccaggtggcgggccaaacgcccacacgaggtgatctggtggtcacgcatgtaggccggtttgaggaccttggccagcgtggtcccggccacaccgatggtctccaagttaagcaaggtcagcaagaacgactgggcgacctgcccggccatctccgggggaaggatgcgcagcgggtccagcgacagcttggggtgggccgtgtcgacgatctggcgtctaaccccgtcgatagagttgacaaaggttacccactcccgctcatcggagttgtcggtggcaataatgcgcccgccccgggccgcgatggctgcgcacagccgcttctcggccatcgtcttgcccgcgcccatcttgccgatgaacgccaccgtgttgcctttctgatcctgagtgtcggcatgcaaatcgaggtaggccagcgactgcaacggggagcctgtgaccacagccaacgggatgccggtggtacggcccaaccggtactcaaccaccgggatagatgcggcgaacgcggaggcgtgagtcagctgacggtaggcgttaagcgaggaggagaaccggccaccgggccgggcagcccacagcaagtcctcctgacggcccacgggacgcacccacgtgaagtcaccgaacaccggatcattgacgaacgctcctgccagctcctcggtggtctcaaagtcaggagacgagacagtgacggtgataagagcctggatctcgacctcacgctcatcggcggccagctcggcgttgtagtcgacgagcacctgagcggaatgctcgatagacatgagggtcgaagcctgggtcatctcaccgccctcgacgttgtcgagctgatcgaccgtttgacggatagcccgctgatttttctgcatcgcagcgtgacgggtccgggccactccccggatcgccacgtcgaccggcacgccagtgtcgtcgatacggcccaaaaactcgtaggcaggccacgtcatcgtgcggggcaccttacccagcacgatatgggactggtagacggtctcgccggtgtcggcaccgattttgaggacgcgacgattccacgcctgagccgtccgggacatgtgggagactcgcttgtcatcctcgctggccagcaggtcggaggtcgcggcctcatcgatgaccaactcccccagcgcggcacgtccaacctcatccatgagggcgattccctcgccaggggcatcatcacgcaaccgggtcgggtggcctgacaggtgctgccgaagccagatctgttcatcaacggtgaccgggcggggttggaacgctgccggcagtttcgcaccgaattccttagcctgacggagggcccactcccgtgcgacacggccaggagcggtggtcatgagtccggcggcttcggtgattttgttgagggcggcggtccaggcggtgtgggtgcgtattttctggtcttggttgagtttgatcgataggaaccacacgcgccggcctagggattcggtttcaggctggtcgagggtggcgtcgatttcgtcggcccacacggggtgttcgctcaggtcgaggccggcggccatggcgtcgacgatttctgtggggtcggtccaggtgagggctccgttgaggcagaactcgtggcgggcgaggtggcggaataggtcgcggtgagctgcggcgacggtgagggaggcgttctcggtgacgggtcgctggaggggagtgagtcgccaggtggcccagatgtcgccggtggaggtccagacgaggttgtcgaagaggaaccgttcggggatggacatcatgactccttttcggcggcggcgaggaaggcttccaggccgctgcggcgtacagcgttcccggtagggtgcaggggttttctgggggtgggttcagatttcgaatgtgggaggggtttgtggatggtatcggtgtcctcggcgagggcttggtcgagcaggcaggtggccggggtgtcggtagtctcgtccagctcgtcgatcatctcgtcgaggaggttgggggtggtggatgcggcccacacaggtgggatagccggtgcgggtcgaggcggtgtggggaggaggagtttggtttggccccagaggggtgtgtgggtcatgccggcgggagtggtggcggcgtgagtggtcacacgccaccagcccgccagccatgccagaggtgaccaggtccagtcgatgcgaccaacaacgaactgggcgagccatccggcagccagcgcgaaaatgaaaccgcggatggtcatgcccccgtcgataattttgaagcccatcatcgcggcaggaactacgccgccgacagcgagcacctgatagatcgtgtagggcccgccaggaatccttcgacctgaggaatccttaccgataatgcggggctgctggcgggcctcggtgtgccactgaatatccacgatcagctcttgcccaatccttgcatcatctgtccgaagaattggatcgcgttaccttcgataagccagtgcgccataccacacacaaacagcatggagacgatcttggccaggctcataccgtgtttgaagatgttgaacgcggcaatgcccacgactacgaccatggcgacggctcgcaccgcggactgaccttcacctgccttgatcgtcgtccattcgaagaggttctgcgattccagtggcagcaggaggaattgatcgagcatgagaggttttcctttcaggaagccgaccgggatggtcccggtactgacgggctggacggcacgggtgtgccggccaggggcagaaggcgtgacggctggtcgagggaggcaacctcccagcggcctgcacggctgacaagagtcaggccgtactggctggtccgggtagtggattcgtcgccggtgggctggcatgtcacggtcaccgtgacggtaatcttctgccggtctgagggggtggggacctcgtcaggtcccaccacatgagtggttttcactgatacgcatggggctgggtcaaccgcggtgaaagcggtccctgggctgctccatctcgacaggtcagtattcccggtcagcatggcggttaggaagcctgaagaggcttgggcggccgggtcggcggtgcgaagctccgaggtgtctagggtgggggccgaggccggtgcaggcatggggatctgtccaggtagacgcaaggcgatggccttgccgttggaatcgacgtggaccgggactgaccaggcctgtccgctcccggattggccgcccatggtgaccacggtgacctgccacaggctcggatcagacggggagacggtagcgtcataggcggtgacggtggtgggcgctggaccaggtttgcggggcatgcgcgcatcggtgatcttggccgccaccaggtgttccagattgtccaagtgcccggagtcagaggtcagcagaagagtagtcacctcgaccgcggtggctgagacgatctgagctgtgcggcggtcgtgatgggtggtgtcagtgctgacagctgtggtgggagcggatgccggggccgccgaacggaccagggcaacggggccgcatgcgactccgcacagcacgagggcaaggaagcctttggtggccatcgatccggtgtggggccagggacccacgttttcctgtgcctgttttttcttggccgaccaacggcgggacttagggttagcggatgcaccttctggggtgcatgctcgtctcaatcgcatcggtcacctccttcactggatgaagggaccaaggaggtgaccgatgtgcggtcgaacccgaaaaagttcaaacttttttctgggtctgcctcaagtacgacagaaggcctgcatcatcacggcgttgtggtagcagatcttgcgtcagcgcaaatgtatgggcctcgtaggagtagctcttaggtgggtcccggtggttgcggccagggcgagggtgtcgggtatgtgtagcgctagtcccgggttcgtggtgtgagggcttttgggtgctgacatgcactacccattgctagacgctgtgctgtggcatggctggacgtctagcagacgggttgacatcacctttaggctggcagcgcccgaggccgcaggccagaggaagcggacagcctaacgattgacgtccccctctcctttccccaacctcctgga

SEQ ID NO: 195 - DNA, 9465 bp, Propionibacterium acnes
  source 1..9465: mol_type = genomic DNA
tgtgtgggatcagctgtgccgctcccccgacatggcagacagcaccgttgcatgagaactgactgacactgtggcgccgcggaggtctcccgcggcgtccgctggggcgagtgcatgcctgtcagctcatcttttatcgtcatgtttccccttgtcagagcggtctttgcaaagtgacaacgtcaggggtcttgacgacaacatcctcgacaacatcgtggcggtggtctgtgtctcgtcagttcaacgcaccggggaaagaggcaccgctgatgttcaccaccacaaacaccctcaacgatgagtgggaccagattcgcgccactgagatcgattggcatgactgccctgaactgatgcactgcatcgacgttgatgatgtgttggccgtcattcctgccgcccccgacgccatcttgggctacctcattgcccgggctcagggcggtgacgagttggccacccgcactatcatccaagcgttcacaggcaagcttatcttgatgaccacggccaccaaggtgcgccgtactaatgacggcttcaatgatctgttggcgggtctgtgggagacgatcatcacgtacccgttggatcgtcgccctgacaagatcgctgcgaacctcatcctcgacacgttgcaccgggttacccggttctggcgtgctgattcccccgatgaggaagaggctcacggtctggtgcccttccctgacactctcatcgccccagagcccgatgaggacgtcacagctagccaggccatcgccttggcggtggaccgcaactggattaccgaggacctagcccgcctcatgagccatatttactgtgacggtatgactggagctgatgcgggtcgtctgcatggctgcgctccagctacggtgcgatctcgatgccgtgatggtcgggccgtgttgcagcgcaacgccgagacgatcctggccgtctgctgatccctctcttgctcatgcctgccgccaccctacccctacctgctagaaacatagccatgtctccagcaacgcatctagcgtatcttctagcaattgatctagctatgtatatagctgatgatctagctaccatatagctgtgtctccagcccaaaggacagcccaatggcatgcttgccacaggaaggtgcgtcagcctcccgaaatactggaaggagctttaccgtgcaggacatgacctcgaccagaccgattgaccgatccccgttcgaccgcactattgcggtgtggaaccacaaaggcggcacgttcaagacgtccgtcgtggcgaacctgggatacctgttcgccgccggtggcaacaaggtgctgctggtcgacatggacccccaggccaatctcgacattgacttcggtatacccgcgaaagaacgtgaacggggcatgggattagccgaggcgctacgtgaggggacggcccttcccccaccgcagcatctcagcgaaaaccttcacctggtcagtggcggcgctgctctcaacgagttcaccgaccccgcatccttagcggccatcctcgaccgagtcaccaccgcacgctacgacctgctagctcaggcccttgccccgctggcctgggactatgacctcatcttcatcgactccgggccggcacaaactctgctgtcccagaccatccttggagtagcccgctggctggtagtgcccacccgcaccgataacgcctcaatcactggcctcgtcgacgttcaagacgccatcgacggggttgcctcctgcaaccctgaccttcaactactcggcgttgtcctagccggcgtgggggcccgggccacccggatcgccgcagataaacgccacgccatcgacacagtgctgggggcaggaaccgttttcgatgcggtcatccactactccgagaaggtgtccgtgctcgcacgccagcagggcaagaccgtcgccgagctagccaacgagtaccacaacacccagcccgcctacacctacctagctaaaggccagaacatccccaacgtcgccaaggcagccgtcagcatcgaaactgattatctgaggctggccaccgagatcagcgaccgcatgttcaccagcgacgagcaggagcctgatcatgactgacgatccgactccatccgagcagaacaaccccaccagcgacgacatgcgcttggccgaagaatgggccaacagcggccgcacagtgggagccctgccgcgccgtcaacggcctcagcgacccacaccccgcaccaccagccaaccccctgtctcgtcccctgacacaccggctccgaaaaaaccccagaagacccccaccagccagcctggccgtcaacggatcaacgtcaccgtctacgttgtgcccgaactccatgagcggctgcgctcccgatcggcggcgacgggggtgacggtctcggatctggtggtgcatgcgttagcgttcgtcgccgatcatgcgggggaggcgatcgccgatgatctgcgcgtcgagacgggccccggcatgggggccggactgttcgatgtgaccccatcgcggccagtaggggtcgccaaaacccagctgggggtgcgaatgacccgccacaacaaggatggtttggaccagctgacccggacgagtggagcccgtgaccgcagccatcttgtgtctgtcgccgtgcgcgactatctcgactccaaccctgtaaagaaaggccgacatgtccgctgatgaaactcctgccgcccggggtgggcgacgctttgatacgaccgtcaagcccaggcgccgtcccatgcttatcgccgccggtatcgccatcgtgatagtcggcgcgctcctcatcactcagttgattcgctccgcccaaaccgagcatcgcgtgctggaagtccacgccgatgtggctcgcggcgaggtcatccgtgacaccgatctggtatcggtgactgtcggccaggtcgacaacgtatcaacggttcccgcagaccagctcgactcactggtcggcaaacgcgccacggcagatcttcgagccggatcactcttgcctgctggggctatcggcccggccgatgtcgttccagctccgggcaagtcgctggtcgggctgaagctagccgccggacagatccctatcggagaccttgctgtcgggacgaagctgcgcctgatccagacgtcggcacccagcggctcatccaccaccactgatagcagcaccaataccgatggccagtcgtgggaggcaacaatggcgaccggcaccaaaaagaccgagcaggtcaccttgatcaacgccgaagtgaactcgcgtgatgccgcccggatcgcccaactgacgtcacagggccgtatcgccgtagtgaaggatccgatccgatgagcaccattgttttgaccagcgtctcgggagccccaggggtcaccacgacagcgatcgggctgggcagggtctggccacaatcgagcctggtcgtcgaggatgacacccaccacgccatgctggcgggctacctgcgagcctcccagcacgccgaaccgaacctggccgcagtggcgaacctgacgtcgactccaaccaacgcccaaacggtgtgggaatctatcgccagacccctacccaccgatgacccagtcggcgggctgagacgcaaaggcatcctcggcccgcccacgccgtggtctcgcgcaggcatcgacccccgatggggattcatgctggccctgtggcggcaactggaggaggctggcatcgacaccatcatcgatttgggtcgcctagccacaccactgacctcaacgccacacctgatcgccgcacccatcgtcgaggacgccgacatgatcttggtgatgatcgaggcgacactacgcgacatcgccggcgcccgcacgatggtggagggactcgctgagcagatgaacttggccggcgcctaccgacgtctcggactgcttgtccaccgtggcggccaggcccgcggcgtcgccgagttcaatgacaaggagatcacctcggcgttacgactcccggtcatcggggccattacccacgacccggccggagccgcccaactctccgacggggtcgggcagcggttcgacaagtcacgtctggcccactcactatcaaaggtggcggccagcctcgtcgatgccataaacaagcgccacgctgatgacgaggaggatctgtgatggccagttttgctgataatccgttcgacaagctgcgctcccaggatgcggcaagagcttcggtagagcaggagcctgatgccggattagcgtcggagttgttttcgacgtcgtcggggtgggccagctctcagcaggtgtcccaagctcaaccggtgatgacccgttcggagaacgtggattggccggttgtcgcggagctagccagtacggccactgatgaggttgaggctgagatcagcaggtggagttccactcatgatggggtggcgacgctagacattcgccaggccatcgcggagcctgctattgcctcggcggtgtctacgtatgctgaccgacgccagatcgatgtaggggagacctggcctgatctggtacgccagcgataccgcaaggctgtgtgggatcagctgttcgggatggggcggttgcagccgctgttcgaaatcagcgacgccgaaaacatcatcgtggtgggtaaccatgaggtggttgtcgaccacaacgatggttcccggtcaacgctgccgccggtggccgactcggatgccgagctggaatcccagatcgcccggatggcgaggaatgcgaccccgcggcgagccttcgacgccgatcacaccgatgtgacgatcatgcaccaacagaagttccgtatccacgcgatctcttcggaggtgtcgttgcaaccgtcggtggtcatccgccaacatttgctcacccaaatcagtctgggggacctgtcccagcggggaatgatgccggtggaagtggcccggttcctcgatgaggcggtacaagctggcaagtccatcgtggtcgccggcgagcagggggcaggcaagacgacgtttttacgagcgttgatccacgccattccggcgggagcggttcgccacgttggagaccgatcaggagttgttcgctcatctgatgcctggccgggaaaacacgctggtgctgttcgcccgtgatggtaacggcgaggtggatccggcgactggcacccagcacggcgctatcgagatcgcccagctgattcctcctagcctgcgccaggcgttaactagggtcattgtcggtgaggtgcgcggcaatgaggcttcggccatgttccatgctatgcagtcgggtacaggcactatgagcagtatccactccccgcgagcctctgaggtgccgtcccggctagcccaaatgatttcgatgggcccggtctacgatctggatcaggccatgctgcagatcggtcattcgatcgactacatcgtctttgttcgtaagcgtgacctgcctgatgggagccggctgcgatttgttgagcagatccgttcagtctcgcctggtgattcgacaactcccagtcttggcgaggtgtacacggctgactcgtggacaggccagccgttgaccccgctcatgcctggttcggccgccgacgagctgtctcacttcgcccgagacctggattactgcgaggcccactcatgaacactcccgcactaaccagcgccctcatcgtgaccgggttggggctgatcctggccatcgacgggctggtcccggcgccgcctcgacctggtgccccgctgagcccggcccaaaggtgggccaggctcacccaccgtcccacaggagcggccgggcgccgccgggacctgcgctgggggctggctgttctcgtcggcgtcgtgctgtttgtgctcaccgggtgggtcgctgcgctggcgttgggccccatcatcgtgctgctggcccccaccctgctgggggcggccccaccaaccgacatcccgctgatggaggcgctggatcggtgggtgcgtcaggtcgctgcggtgctgccacaggggcgagacatcatcacagcggtgcggatctcacggccgcgggccccgaagctgatcgccgggtcggtggatcaactggtgtcccggttggatggccgtatggagccgagggaggcgttccagcggatggccgacgagctggactcggctgaggctgacgcggtgctggcctcactagcgttggcggccactcacccgcggggagcctcgacaacgttgaaagctattgctggcaacatccaacagcggttgaaagtgctgcggcaggtggaggctgagcggtctaagccgcgtaactcggtgcgccagatcacactggtcacgatcgccatgttcggggggctgctcgtgatcggacggtcgtttctggccccgctggcgacccctcccggtcaggtgctggtggccgtggcggtggtcatgtatgtcatcgcactagtgcagatgtatcggatggcgcggccccgtcgacgcacccggatcatggtcaggaggacccgatgaccattactgctttgtccctgctggccggggccatcgtcactgtcggactgctggtcatcgtggcagcgttccgcccagccccaggccctgacctggttgccgctctggaggtggtgtcgggtcgcacctcaagcgtcgccgagaacgtcgaccagacccggatcgggcggataggtcgcagcgtgacccgcacattccatgtgtcggtgtccccggccatgcgggccgcactgcgactccaaggcacgacccccgaagcgttctacggtcgacgcctgatctgcgcactgatcggggcgatcctgccgtggctgctcaacgcggtagccatcgcggtaggggcgaattccccgaacctactcatcccttcggcgctgtgtgtggcgttagctggcgctggatggatgctgccggcagcacggttgaaggctgcggccgggcccaccaacgacgactcgttcgaagcgctgctggtattcatcgatttggtcgtgctggaacggctcgccaacgaaacctccgtcgacgcgctcaccaatgcggcaaacatgtcggactcgccgctattcgtccagatccgtcaagtcctcaaccgtgcctccctggaaaacgtcgacccgtggaacgggctagaccggctagccgaggacatcaaactgcccgaactcaccgatgtggtctccatcgcccgcctccaaaacgaaggcgcctccctcgtcgacagtttccgggcccgagtcgccgagttacgcgacgcctacctgctgcgcctgcaacaagaatccaccgccatcacccagcggcttggtttgtggacgatcctgcaagccggctcggtcatgctcatcttgctgggggcggccgccctcacactcatcacagccggataaaccgacaccgtgtcgagcccccatatgggccgcgaacctttcataaagatgcctgtaagcaccacaatattgatcacaacctaacaatgaaggagaaatcatgatgaccgatctcgacctggctaaaaaacagatcacctggctggcggcgcacctgcgttcccggatcgttgacgagcgtggcggtggtagctctaccgtggagacactgatttggattggtgtcatcgtggcgctggtgattggtgtgggcgtcggggtgacggcctatatcaggtcgaagatgcctcactgacgacgatgcgtagcaggttcacaactgatcagcgtggcggtggtagcgcgtcggtggggatgctcctgctgatgcctgcgatcatgctgctggcattcggtgggatcgaggtcgggatgtggtgtcacgcccatcagtcgaccatcgcggcagcccaaagcgccgcggaagctcagcgtgtcgtccatccggtcccggggtcggcacaggaggcagcctcgcagatcactagtcatggcggggtgcgtgatacccggatatcggtcagtgatgacggggccactgtcacggtgaccgtctcaggtcgggccccatcgatgctggggctgcatcttccggctgtgtcgtcgacagcgtcgatgcccaaggagcgcctgtcgtgaggcgaagtgagcgcggcggagcaagtctaagcgtcgaggtgctcatgtgggcgccgatcgcgctggtgatcatcgggtttgttgtgggtatcggccggatgtcgatggcccaggacgcggtgagtggcgcggctggtgctgcggcccgtgcggcgtcgttggagcgtgatggacagtcggctcagtctgcggcgcagcaggcggcgtcggcgaacctgtcgtccggtgggctggcatgtgcgccgagtgtgagcgtggacacgtcagtgtttgcccgtcctgccgggcaggcgggcacggttcacgccacggtcacgtgtgtcacctcgctgggtcttggattcgggtcccggacggtgcacgcaacggggtctgccccggtagacacctatcgggaaaggagaggctgagatggcccgcgatgagcgtggtggcggctcggtgtcggtgtggatgctgctcatggtgccagtaattctggtcatggccggcctggtttttgacgggtcccgtcagatatcggcaacccaggcggcccaggacgcggcggttgcggcatcccgcgccggaactgatgcggcagcgacaccgcagctagctggccacgacggggcggccgtagcagtccaagcggcccgccaggcactatctgctgccggggtggacgggtcggtgcaggaggacgggtcgaccatcacggtgaccacgtctcaaagtcggccgacagtgttcctgtcagcgatcggaatcagccaggtaagggggcatgggcaggcccatgctcagcttgtgggaccgggagaacgcccatgacagtgatacgtcgtatcggtgccctggtggcactgctggtggtgatagccggcttacccgccgggctcgtggccgcaggcgccccgctagtaccctcgggcctgtcatgggcccatgtgcggcatctgttggttaccccagacatgaccgggtcggtgctggtgtggctggtcagcctcatcggctggatcgggtgggcatggttcgccctggccgtcgcagccgaagcggtgacgatgctctcaaggcagcggctgcactggcacatgcccggccctcgcctagtgcgccgagtggcagccggtctcctcattgccgcgttcgcggccgcaccggcagccacaagcacggctcacgccgccgagaccacccatgtggcggtcgccgcccaggctggaccggcacacgcggccggcacccaggacagccccgccaccacctctcaggccccggacgcctccaccactccgaaaatctggaagacctacacggtgcgggccaacgactacctgtggaagatcgccgagcactactacggt

SEQ ID NO: 196 - DNA, 3127 bp, Propionibacterium acnes
  source 1..3127: mol_type = genomic DNA
ttggtattggtaggcgatggtgtcaccggttttgttgcggatgacgtcgaagccttcgatgtcggaggggatgtcgtcggcgtcgtagacgacggtggtggtgacggggttggaggccgacatttggccgatggtcacgcgcagcatgtttttcaacgcggaggtgaggattgtcgtggcggtggggtttttgtctgcccagcgtttctcggcgatgtcgatcatgtcttggatggttttgacccatcctcggatgggatcgactttggtcagtttgatcccttcgaggaactcgatgggctgggtgatgggcccatcaggaccgaattcagtgtcccagccttcgtcgatggctagtttcagttcggcggcgtcaacccatgtttcgtgggtggtgccgggcacgttgggccaaaaccatcctgctcgtcctttggtgcgtttgaccggtagtaggccgatgtcgtcccaccaggatggcacggtgaagcggatgtggtagcgggccgggtgccaggggttgttggtgaacaggtcgcgggcttcggtggcgctgagcagagtggcgggtgcggcaccgatctctccggtcactgatccggcatacatgaatcggccgtcgatgtacacgaagttagggatagggccggcaggcacggtggggcgccaaccttgttcgcggtcctcggggttgccgtcgtcgacgcatagttcgtagcggtgctgaggggaggtgtgttggatgagtgcgcccagttcggggtccatcggctccatgcgataggactcgggggtccgtagcttccagaggttgattccttctgctccggggcggtccatgagggcccagtcgcggtcgattctggtggcgatgatgtgggttaattcgcgccatgcccagcgggcctggattggggtgagggtctggccagggaaccattcatcagcgaccagaatgtcgaggttgcggtcggtttctttgtgggtgaaccggcctcgggcgggccgcccggacagcatgaacaggccccgcacgtgccagtcctggttgaactcgcgggtgtgagcgggggtgtcaggcagcagccaggattgaggctggtcggggatgttaccgcagacgatcaggcgtcgggcgttgtggtgtagcgcggttgttagcaggtctgacagggtcgcgtgcttggtgcgccgcccccctagcactggcaggatctcgtttccggccgcgtcgactccccgggcggtgtcgatgtctagccacactgtttcggggtcggggggccgatgtggggcgggacggcgctgctcctggtcgtctctcatggtttcctcctttgggccagggagcggccggcgtcgagggcgttcatgcgctcgcgttgttcttcgcgtagttggtagacccggcctcgtgacactcctgctgcctcggcgatggtggtggccggcaggtggccgatggcggcagcgtcggcaaggacgtcacgccaggccaggtcaatggttcccagctgggctagagcttcgtcgcggcggcgggtggcatcagccactacggaggcccaccctgtggggtggatggtcttgacgacgattcggttgtggcggatggggccccatgcatcagcggggacttgccagccgtgattggcggcggactcggtgatcttgaggcgtcgctcaggtgcgcgggtgcgggcagtgacgtcggtgttccaggtctggactggtacccacgtcccctctcggatgcgttcgatgacgcacgtggtgacctcgtcggtgactgtgatgaccagacgataatctttcccgtctggggtggttcggtagctgggcatgtcaccctcccctatctgtcaaatgagctagacacagtgtctatttaatttgacgcaaagtcaagtgcgctagacgcctttgtgtggatccgcccgcccagacaggcactcacgtctcatgacccgccgcgacgtcttaacgaaaccaaaccgcttatagaaccgctccgcagcgctccccgagggctttagctccaaggtaagaccttgctggtcggcccattggcagacttgggtgaggatgtgtgatccgtagccctgatttcggggggcggcatgcacgcacatcagcatgtgaccatgacggcgggtcggcgggctgacataagccccaccacgccagtccggtgtgatctgccaacttcgccatgccgcagcgcgccagcggcgggcctcggtagccaccatgatcaccatgatgatggacagggttacgacgccgactatggtcagctcactccagccaggccagttcccgcagatgatccagcctcccagcgcccagatgatcatggcttccacgcccgccgcaatcgggacgagtggggcagtacggatgcggcctgccatgatctcggtgatctcgctgcgatgccatgacaaggagaattcccacgactcttgaatcatgctgatgtgtgaacggcttcctcggcttcgctttgccatagcttctctagacggcgctcggctagctcgtcggggcacggcgacagcctgccgcactcggagcagaccccgaagtggcgcgagagagtgatgaccggctcatcgggagcatgaaccgactcaacgaccgggtgctgctcatcggtgagtcccgaagcgtgaccaatctcggctagacggaggtgaaccataccgtcgtagtagtcgaggccttcaacgtggaacgggtaggagccgtccgcggtgtggcctgcaaccaggtccccgacttccagctgactggcggtcatggttcgcaccggcggcagcggggtccgggtcgcgttgatcctcatggtctctccttgcttctgcgccttcatagatgaaggtgccacagccggggttgatgtgcggaaccacagccactttttcagcagatccatcaccacggtctcaccccttcccaaatgtgtaaaccatgatttacacatttggggcatgatcgaacccacaaccatctccaccacgccccgcgtggccatcatctcccccagcgggccaccacggttcttggccgagcctcccagcatcgcactgcgccgacacggccggtcccccatgaggtcccttcc

SEQ ID NO: 197 - DNA, 1732 bp, Propionibacterium acnes
  source 1..1732: mol_type = genomic DNA
tcgctgactacctgcccgcctgatcccaccccaatccactcgggcgcctgtcagtgccccctcttctgggtggtggtccggggcgtcaccgccccggaccagttgggtagtcatctcagttgaaataagcgattagtgatacgcccctcctgctttccggtgctgtcatgagcgtctgacaacagcgacacctcggggcagccgacggacagtcctctggctgccgctctgatcccatgcccacggcacgaaggtgtcggacagctcggtctcgtcatgtgcccaaatagcgtcgtgggcctgtcgccaagcttctcgggagccccacacgggcacgaccgggccacaccggtgtcctggtctccagtgtcgcgacactgtcgatttcggtacgtgcaatgcggcggcggtttgacggatcgacatcccagactcccgcgcgtcccagatcgccatgtggagagtatttgcctccagtgcggccgccacacttgcacgctctcgcgcacgctcgaatgcccgcctagtgctctcaaatgtcgtcacgacgcctccccctgaaaatactcagggtgtcccacggtgggacaccctgagtatttcataccccaactcgcctcaccacacgtcgacctcgacaccgatcaagcgacccgtatcagcgacattgccgtaccgctgacccgcctggtcctctagccacgacaacgcatcccgaaacagcccgacgtcttccaaagctaaaccacagtcgtagccgcccttgtcccccaaccgcacaatctggcgctcccggtggcctccctcgtcgacctcgatccacagtttcgcgtgcatccgctggcctcggccctctgacaggatctcggtgagcaggtcggacgcctgccctcgcgcatcctcgttactgcgggggaattggagtatgtgggaggaacgacgatgggggaggttggtgacctcgtgacgcagcaggttgcgcttgtgcatctgctgatcgagacgctcgggctgacctgttgacggggttgagccgtggcgccgcttcctcggcggggtctcgatccgttgctcttccggcggttcggcgtcaggttgtggtgcgcgatctcccctaggacgggggggctcgccacctatatccgagggacgatgagacggccttccacgcttgctgcgcactttcgcagcccgccccttgcggtcacatcgacgcggcggcggggtaacctcctcgccccgctccaactgtgttaacgcctcgaccaggttggtgccaggcttaagcccttttagcacgaaccgcaccaggcgggggtctcggccgattcgtcgggcaatctcggcttggctccacccttcggctaacagggtgcgcaccaggtcctgagcccgattgtcacgctcagtcactggtcgcctcctcggggagtcctacttgctcggcctgctctgatagagcagcccgttccgatccggtctggggcgctttcaggggaccgggtaggacacctttgacacgcagtcgcccgtccttgccgtcgtcgccgcccccctgggccacagggagcgcccaggggggcacgttgctggtgtagatggcgtcgccgtggatagccagcagggtgcgggagttcatgcgtagtgctcctcccttggttgtggcgttttttccggtggtggggtcggcgatgggtgtgttgagggtgcgtacgcgggacagggcccagat

SEQ ID NO: 198 - DNA, 718 bp, Propionibacterium acnes
  source 1..718: mol_type = genomic DNA
ccggggccctgctgccggtgtgggacaccgccgttttgactgggcctgccctcggcagacgtgtgcgccctctcagcagtgacgccgaactgacctctcggcggtggctcgaccaggtcgccgaccatcccggcttcctcgacacccttatcgaggccgcccgcatcaccgagggatggcatcacgcaacacctccgcacattcaggccccttaccggacccttcatcagtgaacggaggtacaacgacatgaccagcgacattgacattgaccggacccacaaacccgacgaccgcgccgaggctcctctttaccggtcctgggccaggagactcgtgcacgtctccgggatgccctggcgtatcgtcgccgccttggccggggtctcccccacctccatgcaccggcttctattcggccgcaacggtcgacccgtggaatggatcggcatcaatgatgctcgcgccctgatggatatcggcatcgatgatctcgcctcagcgtccaccgaccgtatcccggcccgcgaatcccgcgagctgttggtagccctgcacaccctcggctggaccaacgcgcacttgagccgctggctgaccagctccgacctcgacctgaccaccacccccaaagccctctacgtcacccggctatccgccgcccgcatccaggccacctacgacatgctcatcagccaacccgtccgccgctgcggcc

SEQ ID NO: 199 - DNA, 12176 bp, Propionibacterium acnes
  source 1..12176: mol_type = genomic DNA
aaccgtcatctggcgtggagtagcgagctgatgcaggaaggcaatttgtacggccttcccgaggaagacccgttgtggggcgaggccgtggagctggtagcgggacttatcccctctgtgcgggcgatgtggtcgcacgatgggcagaccgtgactgtgtcggctggccggcgggtggcgacactggggatgccgatgcggggatggcgtggtatcgagatgcgcggctggaatccagtgggcgccgatacgtggtggatcgttgaccaggtgggtagttggctggtcgatcaggatgagccgatggtcgttgacgggagggtgctccatgaggcgtgggaacggtcgcagatggtccgttcaggccgctgagaaaaaatttaggtccgccctgcatatctccgccctgcatatcggggcctcttcataccttcaaaagtgtgaagggaatacagactcttcgactggaattaaaatggtatatggcgtgtccggtccgcacccagctccacgatgcgccataggggagccataacttcaccaatcgtatacgatatgagtgtaggtgagcatctaccggtggccgacagtcagatacaagcatgggcggatgaagcagaagctgattatgacctcagcatgcttccgccgtctcgacgtggtcgcccaccggtggggaggggcccgggcactgtggtccctgtgcgcttcgacgcggacactctcaaggcgttgtcacaacgagcccctgacgaaggattgaccacgcgttctgacgcgatccgtgctgcggttaaccagtggctcggcctcggctcgtaaacattatcggcgcgacaaccttactgatgacgctgttggttacgccgtagagcacatcttgtactcgtgggcgctcgacgatgctgatgatcctcgttgctggatgatgattcggtgttgacccagctggcctcctcatggagctagttatcctcatctacgacgatggctatgaactcctgatccacgccatgaaagcccgccctcagtatctgagctacttcgctatctagtgttgttgggcgagttgaactcaacttttctccgacgcaagcgccaataaaaggctgatccatccgaataccaccaaacacggctgacgtgtggaacagattcagcaagacagggtgcggtgctcgggtgcgttggggagatgaggatattcaggcttctggcgggatgtggcttgatgacgtccaggatcaccggttcggttttgaaggtgccttgcattaatgtcgacagggtcgtacgactcgaggattggatcgaccagcccgttgcgtctgaagaacttcatccaccccggtggagctccggccgcgtactggtgcaacggatcattagcatgggtagcgtgagtatgccttcgatcgtggtcagtgctgtcatcatccaagattctgacgggcggcttctcactgtccgtaaacgaggcaccgaggcattcatgctgccaggcggcaagccggagcccggcgaggactcgcgtcaggcagtagtccgggaagtgcacgaagagctcggcgtcgcattgtcttccgacgacctgcgtcgggtgggagtgttcaccacgcgagcagcgaatgaggccggccatcaggtggtggcgacgattttcacccacaccccggttgcggtgagtgagccagctgctgagatcgagcagattcgttggctcgattggagtgtcgacgccctgcctgacgacctggccccgctgctggtcgaggcagtcatcccgtggctgcggcgccgtatccggtcggtcgctgtattcacgggtgcgaaggatggaaccgaccctcattatcgtgtcgaagcaaccgccttgggccggggtctcgcacacgccgggatcaccctggtttatggcggcgggaaggtcgggatgatgggtgctgttgctgatgcggccctcgctgctggcggcgctgtgatcggagtgatgccgcagcacttggtggacggggagatcgcccatcctagtctgactcacctcgaggtagtgcggactatgcatgagcgcaagcagcggatgagtgacctagctgacgcgttcgtcgcgctacccggcggcggcggaacccttgacgagctattcgaagcatggacatggcagcagctcggtgtacacagcaaacccgtggccttgtacgactcgaccttctgggcaccgctgaccgcgctactcaaccacatgaccatcgaaggcttcatccgccctgaggaccgcgcctcgctcgtgatcgccgataccatacatcagctgatggccgatcttgagggatggaccccaccaccaccgaagtggcgctcgtgacatagaacaaatgattctgactatggctcattgacatctgcgcagcggctactagctccattgacttcaaatcgggccttggccgaggctcggttcaggtggcccggaatggatccccacaaattgaatgctcatgatcgaggtgatgaacgcccactctattgtcctacgcccggttgtatccagcgagcaattgaaggtgctgcgcctgttggtcgaccaggccgagccactcatcatcgacgggcgcatcttgtacgaggcatgggacaggctgcaaacagcccgtccggcccgctagaaaaaatttttagggcccgctccgcacatcccggtctgtacccacaccttcaagggtgtgaagggaataaaaacacacctaacaacaactttgtttcatgatttggcgcgtcggaccctttctgaccgatgtcgtgcgcaacaatggacccatgagttcgcctaccaagatgcgccggaaggggacacgcggcccgaaacctcgcagcgacgaggagctaacggctgtgatgttccgcgtcccagagtcagtggccgaacgtgtcagcgatatggcttgggagctgaggctctcccgatccgatcttgtgggctggtcggccctctatgcactcaactcgatgctcagacagcgcggagaggacacgattccggttccggagtatctggacaaggccgtgctcgctgcgttgtatcccgatgggttgcccttcgacgaggacaacgaggagccgggcgagaatgccgggcaggaggagcttgcgatgactggatgagcccgaacatggttgaaggccgccccgccaggcgaccttcaatcaatggtttcggttgtcagctgcagccacccttgccaggtgctgtggttcttctccagaggaggagggaccgccatgaagaccaagaagacctagaagatccaaaagaaccggtttcggctgttgcttcggtcttcatggtagctgatagcccgcgtcgttggaagtgcgacgacgccgatcctcatcggtatcgcaccctgttccagggtcgagaatgtgaaggattaacaaccatgacaagtcatgaggcgtcctcccggagggcgtcatgaccgctttaattcaagctctgccgacagctgaactgtctgctggacctggtgctagcagtccagctagaccctctgctgagggcttcatcaagattcatcacgaccttattagtgcgggcgtgtcgggtaacgcgatggcgttgttcgtcgcgttacgtaaccagcccggctgtgatcagtggacccgtcactcgtacctgcggctagcccaatggtgcggctgggatgggctgtcgggggcggcgggctgtaagcgggtgcagcgggccgctgctgagctcgctagcggtggttggctggaatcgcgggtcggccatgatcgtcgcaccgctaagacgctggtgtggcatcggttgaccagccccgacaccgaccgctgggagcaattgccgcggattgtgtgggcgaggatctgccagatcgccggggagacgtcgggagagtgggtgaggcattggctggtgtggcggatgctggccggtcgtactggtgtggctcaggcccctatgtccatcgtggctcggttcctgggctgttcttcgcgccaggtctctcatatccgtggggctctcgttgatgccggtctgctcggctgtgacgaggtgtcgggggcggcgagccgggtgtggttcccctcgatggccgaggagtgtgcagcggatcgtgaggtggttgatggggccgtcgtcggtgctggggtgggctctggtgaaggtgtcgaggagggcggggaacccctgtcgattttgtccacccacccctgtcgattttgtccacccacccctgtcgattttgtccgccaagtattagacaaaccattagacagtgaattagaccttgggtcgcgtcagcgtgttagctcaccaacgcgcgcgcgcgcggcggccgagccgccgaagccaaagaaacccataccaccaacgcctgaaccagcagcccccgcttcagacagtcctgtgtcagcgcacgctgatgaggctgccgagttggcgtggcggttcgtggggtggtgtcctcagctggtaggggcaccgaagaaggtgcgtggccagctccgtcagctggtcgctgccgagatccgccggaatccgggctggctggatgcgccagcgttggaggttgttgcccagcgggtacgtgctgaaggtgcgctgggggtccagcactgcgagattgtgcgagccgagctgcacggggtgatcgccgaccagaaggccgcccccgcccgccccgacgccctgcacgcgcgggagcccaagtggtgggacgacgtgtactacgaaggaaacacaaccgtgtggtacgactctgacgaaaccagtgacgacgacgaggcgtggaaccggtcgcaggtatgtcatgttgctgagcgtgacgacatggctggcgggattgctaccaacctgctggcctcccacgctgatgatccgatggcctggctgactcgccgtcaaaccatgctgatggctcgtttcccccacgcccagaacgaggtcatcgcgatgtgccacatcgtgcgcaccgccctggaggccgacatggccgccggaacccggtgggaggactgatgagggtctcccggcgcgccctcatggccgtggcccgtgccgacgctgccgcagcagaccatgccaccggccgatgggtggccacagccaacgccaccgtcgcccggctgaccggactgtgcgaacgcaccgtccaatacgcccgcgccaccctggtccacctgggcctgtgccgcgtcgtggccaccggccgctacctcaccgccgacgagcggcgcatggctgctcgcacccatggcggccgccagatgcgcgccgcctccacccgcgtcctcaccatgtcctgcgcaatcgtttgcgccctaccccgaaggggtcaccactacaggaaagttaagttcctagatggtcaccaacgcacgcgcaggcgcgtgcgaaggccagcaacaccagagaagaaacccctgtggctgcaaaaactcgcagccctcctcgaccagcacctgccctggctggtgagaaaccatcacatcggccgactgtgccacgccctcaccgccctgggcatcgacgaacactggcaacccgcagacctcgacgccctcctcgacgccatgaaccgcaggaaccgtcgcctcggcctcgacgtgccatgcgccgacgaccagcacaaccccttgggactgttcatccaccaggcccgagacaccctcacccacgacaacccccatgaacgccgcctggcccgcgaacaccaccgcgcccaactcatcgacgaccaactccgccgccgcgcagaaaccgccacctgcgcagcccgcctcgcagccgagcacgccgaccccgactaccagacccgccgtcgtgaacgcagggaaaccctgcgagccacactcagggccgcccagcagcatgtcaggacacactgatacccgctcatacacacaccgtgaaacacgacaagccacctgacagtatcagctgcaagacgcatgacaacatagaagggcatgatgaaatacacatagacacaaccccgcacagcagtttcgcaacaaatcatgatagtctcatggcagtatcgcttgatacacacatagcatcactcccacataggcagttatgctgatatactcctactaggttatccgtccaacatgctgagtgggttcctgtacagcatgaaaggagcatggcatgatatgggccgttctcaactgcaagggtggtgtcggcaagacgaccagtgccctcctgcttggcggcagccgccgccaagcagggccacaccaccctggtggccgacgctgacccccagggcaccgcatcccagtggtcagccctggcaaccaaaaacgacgaacccctgcccttcccggtgcaagcggtcaacatcgccaccatggaggcactgcccaccaccaccgacgcccatgatctcatcctcgttgacacacccccctcggcaggcgatctgatgttccaggcatgccgcatcgccgacctcatcatcatccccaccgccacctccggacccgacatctcccgaacatgggtcaccatggacgccacacaaggcacaccacgcgcgatcctcctcacccaaaccgaacacaaccgtgtcgtctaccgccaagctcgcactgccctcgccgccgacgacaccgtcgttctcctggaccacgacatcccccgccgtgaatccatccgcacagcatggggcaccaaccccccagacgacgtcatcacctactacctgcccgtcctcaacgaactcatggaggccctgtcatgaccaccaagaaaaccgacccattcgcccgccagaaagcagcagaagaccgcgcccaccaactccaagacgaagcccaacgccacgcccaccccaaacgcgtcatcggccccaccgcacgattccagttcgtcctgccagccgacgtgctcaccggcctcaaacacctcgccctcacccgcggcaccaccgcccgccaactcaccctcgacgccctcgacaccgcctacggcctcgacaccctcgccaacagcgggaagaaaacccacccatgacccgtgggtccccctgccaccaccccctcgacggcaactgtgtgcgagccacaggcccgcacacaggcggcagcccagtgccgtccccgccaggaaaggaactgaacttttctggagtgctggctccctatcaccccttatggtgctatcagatccagtagcgccagcccgagaggaaacccatgagctacatcgtccgcaccggaaatctagccggcacccccgagctgcgcgaggggtagccgacacggcggaccgtgcccctgacagtaagcggcactactggagacatcaccatgaccgctcagatcctcgccccgtgcaaccagaaggctgccgtcatcgaaggagccctgccatgaaccaacctaccccccacaaggccgacgagttacagacgagcaacaccacgaggaagtggcggcacaaggtgtcgttctaccaagacccggccgacaccgaccgagtccgcggagcgatcctccacaccatgacaaccgaaggcaaccggaacctgagccagttcgtcaacgatgccgtcatggccaaggtgaccgaactggaagcaaaatacaaccacggcgagccattccccgccgtgggagcccgaggactcccccagggcggcgcagccgccaacagataagagggcggggaccaccaatagcagtcgatttcggatccagatcgggtagacaggacccatgatgaatttcatatcctccctgctctcggccatcctgaccctctttgcgatggtagccgtggcgataggagtggtgaacattgtgccgggaatatgcgccatcatcggtgcacggaaatacggcgaccaggaccgtgtgcgggcaggacaacgaaagatccttcttggtgctatcgccttggtggtagcagtaggcattcacccgtgacccacggttaccggaagccccgccgcaatcgataccactgtcagtaccatcaggggcgataggggtcaagctctccttgtcacaatcccttccccggcagcccagtaaccgtcgcttacagccatacatggatatgcgcccattcgtcggcaccgacgccgtgcgggttggcgacgctgacccgtctgctcacaaacgacccttccagcccagcaccacccactacaccgacacgatccacgaagctgaaaccgaacctcccatccccgtccgaaacatcaacgaactcatcaaccccaccaaccatgcatgaacgcacgatcgcctaccggccagccttcctgcgcgacgtgaagcggctcaaaaacaagcactacaacatgaacacacactcaaatgggcggtaaggtcacgaagtcgacgtggctgcctcacggatggcttcggcgagctcttggggtcgactccacatgggccagtggccggttggcagatccatcgcggtgaagttggtcaggtgcgcgacggcgctgaacatcggattgcctgctgcggccagctcgaggacctggacgctgggaatggagcagcagatcaacgtggttagtacatcatggcgagcgctattggacagcgcgacccgtgcccgggccacttgcgcgggttcaggaaccgcccgtgcccggaaccggtcaaggtgctcgttgctgaggccctctaaactggcctgcttgccgagagtatcgaagtcaggaagtggcagctcagctgtttcctcaggtagatctggtgcgaaggcacctccatcgctcatgggaccggagtccacccagacgatccgatggaccaactctgggtgcctgtctacaactaggctcaccggcccgttcgcgccactgtgtcccaccaggaccgcatcgccgcccatctcgtccaggatggctgagatggcgtcagcttggtcgtcgagcgtgcgcgtagtgcgctgggtgtcctccggatcgaggccaggcagcgtcagccccacggctcgactgccagcagtgttcaataactcgactacctcgtcccaagcccaggctccgagccagtaaccaggaacgaggacgataggccgatgctggtcaggtcgcgatgttgaagtcatggagacatagttgcacagtgcgcggacaagggagtggcactatttctggcatgaatttagatctgggtgtccggtgaggcgatcagaacgcctccatgtactgtccgagtgtctacgatgcagcggacacagtcgagcagctggctcacaagtttccaggtgtccttctgcccctatgagggaagtcggctgctctcgcaacctttgagggctgctctggggtcggaaccagttacagatcgttcaagttccgggaactaccgccggtcacgctgattgattcccgggcgatctcgcttctgacgacagtggtcggtaaccgagaggcgtcctactctgaccccgctgctgcggtgagtaaatcacgggcgtcccggatccggccacccgtccaagtgccagccagcttgatcggctaggcatcgtcaaggagcgacgatgaggtgatgatgcgatgtgagcgcaccgcgaagtgaggtataaagaagccttcccgggcgcatgcgtcgcccaggaaggccaggttggcccctggacggctgaatggttgggcggatcaggctgtagcggagacgtgcagtacctcgtaggcgatggcgttggttgggctctggtctgcatcgtggctactgagttcgacgaggatgacggtccaggtggtgatgtcgacggcggtgacgcgggcgatggtggaatcagtggatgctgcaaggaagtcggcggttatgtcttcgatgcagtgggacggagcagtgctggtgggcaggggcacggtcttgacggtcaggcttcgggcagcagagtaatcggcggttccgttaacaagctggtggacggtccagtcctggatcgggtgccggccgaagtcgcgtacgatagccgagtaaccaagttcgccccagcagaactggcgcatcccctctatgtcgcgccagacgtagaagggcgcgtaggagttctggggtgcgcctttgaccttttcttggatgaggtaggccttgaactccagtccatggtagccgtccatgaggtgtccagtctggatgacgcggtcgcggatgatctgcatgtcatagtcggtgggcagggtgatctgatattgcatggcgtacatcagcggttctccttggtttcgtgggagtaggtcgtgggggtgacgggttcctgccaatcgatggttgacaagtcgttggcggcttgttggtaggtaaggtggatcattggctgtttgagtgcagcgccatgccagtgtctctggccggcgtcgatccagatggattcgcccttggtcaggtgctggggtgcttgtccttcaatatggaccagggcaacgccgcccgtgacgtagaggccctgtcccttggggtgtgtgcctcagcggcaaacgtgacggcgtgggcggcacgcccggcgtcttccgtggcacgatcggccggatccatggcggcgcgcagctgctgttctgcagccaggcgtccaggtcacggcgggcagcatcgacacccagggcagcctcgacggcttcagggctacgacgctggccgggctggttgaccgcagaccactggtgccgggcgtcgtccagatcatggccggcggcgtcgatgagggcggtggtggcttcggcgcagcatcgcctgatccactccgaacgtgacaggccagctgtctcggcggcactgtcatgcgcgccaggagagatttcatgggcgctcatctgtagcctccagataggcgttgatgtagcgcagagcctgatccgtcatgtcgatggcggctgcctcggcagacgacacaacgggctgtggatgataagaccacccaacatagacggcgaacatcaatttctcgacagctttcatgaggtccccggcggcaaccgcatccgcctcatcatccgaggagaaccacttcaggtctgaacggctgtacatagcccctaggtcctgatgtgggtcgaggtccttggaatgatggaagttcctacacacccatcgccaaagacctcaacatggacaacgctaccttcaccactccctcatccgtgaagagccagtttatgcacggtgttgaaagaggcgtcggtctacgacgaatgcgggttaatggtcttgcggtgtggggcgctgggcgatggcatcgagaacgcgtgagtgggtggcgatccattcggccgcgtcggggttgatgttgcgggcgacggtgtcgatcgctgttacgtagtgggcaagcctgcgaatctcagcttgttggtcagggtgagcgctgatgaggggctcttgatgggaggcgcggttacggacgtggcggatgagctccacgttttcctcgaagtcgcgtcggctacgccccgggtagtgaggcatacctccgttacgtaagtcagtgagagctttccatacggttgcttccaggcgcggggtgagcagaaagcgccagttgtccagtgacagactcgccacgatctgatcaggggtcgcatcgagcctcgcgcgccgcagtcgcttctcggccctgtcgacgttacgcgggaaaccaccgagccgatagctcggggattcccaccaacgccgtatgccagtatcggcgctcaggcgcacgtcaatgaagtttctcaggagtacctcgacatggctgatgtcttccaagaacgctttcgagatgcgggtgttccacacgtaccacgcatcgactggttcgatccggtagcggctgagcctggcgggtgagaaccactcctgcaacgtctcacgactcaccgtgggagcgtggtaagattgatgacgataggcctcgggaaggtcaatgccgcgaaatatcggtatacccccgaggtcattgtcttgcccaggcccctcctcgcatacttgcggggcgtcattggctgccgtcatctcgtctcttcccggtacgtggctgtccatgttcacgggcaggtacggcaatgaggttcccgcacacaaacctctaccaagcatacgctggcaagccgttgcatgagacgacgcctccgcccgccacaccaacggtcaccgccacggccacggtgaccgtgaccgtg

SEQ ID NO: 200 - DNA, 7612 bp, Propionibacterium acnes
  source 1..7612: mol_type = genomic DNA
ggttggactctgcacccatttcagccgggtacgttgccggctgggcgaaggaagcagacggcgccgcgattgaagctgccgccgagcacgtcgcgaagacctcccacgcgattgccgaggcgttgcagctcaccgcacagtgagccccacggggcgaccggctcaccccggtcgcccctcaccccccgacaggggaaccgttcccgccgcctgaatctccatacccctgatacgtactacgcggggtcgaggagtggactccccccgccctcgtgtagtacactgtactacagatgtcttaagaataatcccgaggtgacgtcatgagtttttcgatccgtttaaccgaccatgagcgccgcttagctgattcctacgcccgcctgcactcgcagtccctgagtgaggctttcaagcaagccctcttcgaccgcatcgccgacgagttcgatctgcaagtagcccgtgaggcactcaccgactacgcccgcgacaactaccagtctcgccccatcagcgagctatgggacgagtgtgacctatgagctggcagatcgaaaccacgagccggttcgataaagaattcaaaaagctagaccgctacacccaaaaactcattcacggctggatcacgaaaaacatcgacaacaccgacgatccccgccgccacggcaagcccctcaccggtgatctttccggactgtggcgctaccgcatcggcgactaccgcctcatatgcacactcaacgataaccgcctcaccatcctcgccctgtccatcggtcaccgccgcgacatctaccgataagccgttgcaagactgcggcgtcgacaccgccgggaccctggcccaggccttgggcctggaggaggacgagagcgaggagcacgccgcctgagcggtcgccggcacttcccataacagcaccggtcccggcggcccggccccgcgtctggtgctcggaccgatgccggcgcctggcctccgacgcccgccggggccagcggctgggctacctcgacgtcgacgtacaacgggccgaacgaaccgtgcgctgatttaccaccgcttttgcgctgatttaccaccgcttccgcacagagaacatgcctctgactaggagaaatgacgttttccacagggcctctattactaatatccctattatctctatccacgcgcgcgagcctcagcgttcaagcttcaggtcttgctcgtctccctcgcgcctcgctgcgctcgttgctactgccgccccacccggcaagccgggtgggttgccatcggaataccgtggaccatcccggcgcatacacccagacggtccaagatccaatccacgctcacccgcgacgccgctaacgatcctcatacaccgtagatgccgttctgagagccttccagacccgcacgtgggtttattgcaccgagacccaaatcccctcagaagcgatcctgaaaccgtctacgccccatttccgacggacgctggacaggctgggcggcttgtctcccgccgcagacatggccctggcatatgcggttgccgactggtgggatcagggattggatcacacggcagacggctggtccaaggcgggtgtgcaggtgcggtgagcggcagacgtgaccggtggggtgcactgtcatggccgggcatctgccgagccaccatgcgggccctggaccaggaggcagcccgctgcgaggactgggggaagacggcggcacggatgggccgtcgggatgcggcggccgaattcaccgagactgcggtgcagcatcgtggacagatgcaccacctcatgtcggcacaaaaagtgtgggtgtcgaccgacatggtgtcggctacactggacgccgcaggagacgtgccgagtttcgaggccgtcgacgtccctgccgccgggctcatgggtttggccagccccctgccgccggttaccctgcagcatccgctgtatctgcgcagcgacgagggtgtgacaaccttcactgatccggttctcgtcgacgcgctgggatggtggatggattctgggcgtgtgcacgtggtgatgtgcacacgcataccccggctgcccaacccggtttatgcggtggcctccccactgacggtggtggagaaaatcacggtgcccaccggcatcgagttcgagaccatggagtccaggatcctgacccccggcggcgtgacaggcgtctcacggcagggcacacgcatgatgatccggttggcgtcatggctgggtgccgcgtgggtgctcatggcgactccgacggtgtcggagccgcaccctatggatggccggtggggaggcccagcaacggggcagacccggccgcgtgatcgggtgaccgtggtcgacatgcggcccatgaggcaggtgcacaccaccaccgaccccactggcaggcggttgacgacccggcatgtcgtgcgaggacactggacacaccaaccctacggcccggcccgcagtctccgacgcctgcagtgggtcgccccattcatccgcggccccgaaggggctccgttcgtcggcaccgacaccgtcaccgtatggcgccgctagatacgcgggcgcggggggttgacgaacgatgcccccctctttgtgttgtgatcagtcgtgatcggcgggttttaggtcggggtaggtgtcgagaatggccttgaggacgaggtcttggattgtggtgtcattctgggctgccttgaccttcagtccaacgccgatgtcccgggggattctggtctgcaacttgaacaggtctgcctccttggttttgaacagtttggctgcagggttggcaacgggctgttcttggcgctggcgtccaaggttgcttttctttcgggcggtcatgacatcatctccaacagttcgtcggcaacatcggcgaagaaggcgatagtttccggctcaggggtacagccgtaggcgcgcttgatgacttgacgcttggggatgacgtgatcgaccaactgcgtctgggagtcgttggctagaaggtcgcgaccttccttgaacagggaggtattcggttcagctttggaaagcagcaccacgcgcggggttcctgcggcggcgtcgtgcgtctcccaggtgcgcgccatgtcgagcccggacgtgtcggtggggatgataaccagatcggcggcgcgaatggcggcggtgatgatgtcaccgttgcccggcggggtgtcaatgatgacaacttcttcgggtccggcgacgaggtgctggagcgtcgccttgttggccggttccacggggaaccccaaggggtcggcgttactcagtgtgcactcggcccaggatgatgctgacccttgagggtcggcatctttgacgcggaccatacggcccgtctcatggagagctgcagccagcaggatcgctgccgtggtcttaccgacgccacccttggcgttgataatgctccagatcatggtgacacctttcagtgaggatgcatatcagtttacctgcaaggagtaaagacggcaagcagttatgccgtttctgcggcaagccgtcttgcatccttggatgtatagatagttgtctacttatggttgtggatcgtggtgtctcgtaccaggatttagtgtgctcgctgatatgcacgactttcgggcggcctgatctggcggtggtgccactaacccaggagtctgatccgcaaggtgtcctcgactttgaggaaggggtctctgctttcgtgttgacctaaagtcaacggccctgggcgatcactgaatcctaataactttgtatccttccctgattgcatcttagcatccttgaattcaaacagggatggagccatgctgttttgacgacatggatgcactggggtttggttgttgccgatgcggagcgtcaggcggcccgggacgccgccaccgccgacacgctgcgggagatcgtgggactgctgggccggggcggcgaggtcccgcccgccaagacggggcgtaagacgaccggcaggccggccccggcccgcaagtcgtcggccacgcagtaaaggcagggatccgtccctacgcagagagcggaggcagatcctgggggatccgactcttcggttccgtgatcttcccggagatcttcccggatcccccagggctcatcctgatacggggtccgccgacggaccccgtatcagtgggggcgctgccaccagtgatggcgggcgggtcggtcggcgtctaggccccgcccgatggtcgcctggtctacctcgcaggcccgtgctgttgccgaggccgagaacgtctgcccacttgttgccgattcagtcccctctccgtctgccatgtcgccaacctttcctatctggcgtgctcatggacatgcccgggcacgccctcgctgctcagaggcctgctcgttccacctctggccgcgaaccgtatttctgctgaccactcctcgtgcgtgaatatttgccagccttggccattcatatttggactactctgcaccagatatcggactgggaaacctcttgcacatctctaattgtcatctattcgttgggcgcgcgctgttagatcgtgatcataccaatcagaagacaaagcgacgcccttttgagcggcttttcgaacgattctagaccgcgctatatcagcatttctaccgcgcggccagagtgctacactaaattcctctctgcaatccttaagtccattctttacttcctcatccaatttctgcgacagcatttttatggaagcatcgcactctgactcatcatcaaatgcctcaattgcgtgcgttcgccattcacggcgcgtattatcgtagccgtaatgaagtattacccaccgatccacagaatcatcgttaggatctacaactgtcatgaatggcccaactctcgctctggtgtattctcaattgcagttcagtgactttacttgaccagtcccggatttagtagacgtagacggagagtaccccgccgggaacttgactgacatcactgctgtaccgtactgctttcccgggtggcaaccatcgtaagcagcatttgccgtgacgtacctagtgctctttctctgagtgccggtaatcgccttatatggtacaggtgggtgaatcgtagccgttacggctaccgatgacacgtttgcatcacatgaagctgtggcgacataattagttgtcccattgacatgatgagagtcgtggacatactgtcgaggatcgagagtgcaggttattgttgacgccgttgttctggtaccagctgctttcgagctctttgttgcagttacagtctgcggccctgaaggttttactgacgcgactgatgtgttcgcgtgttttgcggcagtgctttgatttggttgtgcttgtgtagcagttgctgatgtcgccagtgatgcccccattaccatagctgtgattatggcgtagtctttacgcttcattgcgcccccaaataagcatgttagtttgctattttgaataggatacgagacatcgccatgacttgtcaagggcagaagtagaaagaatcggggggtatcaagaaagatgtgctttcatcaggacgaaagcggatgggtccgttcgacttggtgacgaatgatccggccttgcgtcgcggagaccaggccggcgagtttgtcgagcagggccgccgtggcctcatcgtcgggcacatcactaaagggacgaacaaccatgacggctagggccagaaacgaccggaactgaatcgcatgtggacccccatctggcaccaggcacacacctaccgaccggaaaccctgcaccctgtcgctcccagttcacctcctaatatgcgcctatagtctgtgctagtagacattattttgtgtgttgtttcccatctggcatgtctggccccggacccgccgcgacacgcggtggtggataacagaccaggacccccggaccatagagaccagggggacgagacagtcccccggtgaggatgtctcgatgtgcagatcaggaacagaatcgccgggcacgacccggcgccggtgccggtgcagtgaacccgtggcccatcgactccacgaacgaacgtctcgccttcctcaactggtgttggcggcaaggctactcagcagccatcgtggaaacgatggacgccgcgggagcctacgaccacctcgacgacgaccagaccagcaaccagcacgactaacgccgctcccagcacgggggaaggcggcgcaccaggtgcgccgccttcccccgtgctggtgtctcgtcggcttactggtgggggtcgtaggggaacccgtaggtgtgttccagggccttgcggagaaggtcgttcatagttgtgtgttcggcgacggccttcatcttcagcgccgtgtgggtggcggtgggtagcttgacgttgaacgcggtgatcggggtcttggccgactggaaggtttcagagacactggctccctggctggccgccatttggtcggcgtaacggctggctttgtcggcggcggtgggtttgcggttcttactcacttcagcatctccttgattcggtcggcaacctgggcgaactctcctagatctgttggccgggttccgatggcttgccgataggcgacccgtcgatgaacctccgcatcgagaacgtctaggccctcaacggcggcggccccctcgtgggcatcacggtattgcctggtccaatcggctttgttgaagagcagggcccggcgtgtgccgtgggccacctggtaggtcattagcgctcggtccatgtccaggtcccccgactcggtcgggatgatgaccacatcggcgatgtcgagggctgcggtgatcgtctgagagtcaccggggggagtgtcgatgatgacaaggtcggcgtcgatgtcacggcagcgcctgacgataggggcattagccgggcggacctcgaagcccagcgggtcaccagtctcgaaagcgtcggtagcccatgacgtcgccgatccttgcgggtcggcgtcaagcaagatgactcggtactgagctgctaaggccgttgccaggtagaccgccgtggtcgttttcccgaccccgcccttggtgttgacaatagaaatactacgcataaatacatcattacacatgcgcatcgatgtatctgtatatatgtgtatcggcgtgttgcgaggggaaaccccagcccacatacaacgatcccccagccaccacagccgggggatctctcagtaaagccagcaactcccacagaagttgcacccccacgatacccaccacatccgtgtcaagcccccacaacacccaccagcgccctaggcttcccccatgaacattgacatggacgcaccaaccgaaaccgaagccgacaccttcgatgccgtcctcgccgacattaaccacatcaaccgcctcaccgccgacgaaatcgaggactactccatgggagcctgcctcctcctcaaccaccaccccttctccgaactccgccaacactgggccgacaaccccaccgacgaaaccacgtggaccctctacgggaccatcatcgccgcctccaccctggacccccacctcagcatcgacgccctcgcccgcttctaccaactccccc

SEQ ID NO: 201 - DNA, 4261 bp, Propionibacterium acnes
  source 1..4261: mol_type = genomic DNA
gacgccggccaccccaactactccgacccacacggtgaccccagctccggcctctgccggccactcgaccagcgacgagcacccactccatacggataccgccacagcggacaaggccagcaacgaggacgccctgtccccaatccaggtgggcttgaccgccagcgtcggactggtgctggtcgccggactgatcaccaccctcaaccgccgctaccggacccggttcacccgccagccccgcggcaaggccatgaccctgcccagcccggacgcccaaactgccgagatagcgctgcgcagcaccggggcgactgacactctgacgatcacctgcctcgaccaggcgctccgcgcgatcggcgcatggtgccaccactgcgggcacccgctgccacccctgctggccgcccgcgtcgatgacgaccggatcgacctgctgctatcccaggcggcccccgaccatcccgaggcggtggagctggccgccgacggatcggtgtggaccctcaccgccgaccggatcgacgacctgctagcccacaccgatgacaaccaagcggctccgtggccgtctctggtcacactgggacgcgacgacgacggcgcccacatcctcatcgacttggaagccgcaggaaccttgcacctgatcgccgatgacgaccaggtcgacgcggccctcgccgcgatcgccgtggaactggccacctgcgactggtccgacgaagtcaacgtcaccctcgtcggccaggtgtgcccgggcctagaagacgcactagagtctccgaccctgacccgcgccaccgacgtggacaccctcctcaccaccctagaagctcgcgccgacgaccagcgacacatcctcaccgaaggaaaccccctcgccgctcaccgagccgaccccgccatctccgacgggttcgacgccgaagtgatcctcctcgacaccgaactcaccgaagaccaccgcaaccgcctcgccagcctcgtcgaggctcttccccgcgtgtcagtcgccgcggtaacaaccagccccaccagcccagacgaatggtccctcaccctgacaggtgacccactagccgccgacctggctcccctcggctggcacatccacccccaaaccctctcccccgacctgtacaaccgcatggttgaactactcgccaactccgccgccgcagactacgaacccgccagctggtggaaccacgacgccgacgacgagcccaccaccgaccccaccaacgaggaagaatctaccccgagcaggcgagcccgcccgaatatccgcctgaccaccctgaccggcggcatcgacctatccagcgtcgacatcgacgacatcatcgacgaagccaaccaggccctcgacaacaccgaccagaccaccaaccagaccaccaaccaggttcgcgtcgacaccgaccaacccggcaccgacacccccttccccatcgacgacatcgacccgctgagctccgaccacccggtcctatccatcatcggccaccccgacatcacaggtgccactggaaccgttgggcgctccccgtggcgctgccaacagttggccctctacatcgctgagcatccgggagcatcgggggcgactatcgccgatgatttggggctatcagcgtcgacggtgcgctcgattgctacacacctgcgacactggttgggagccgacgatgccggggtggcttacatgccggcggcgacgcgcggctaccgtctcgatgagcggatcgtcacagatgtggacctgatcgacgctgctgtggccggggcaggcattaacaccgctgagacggccacactggtggccattttgaagctgggccgcggacgggtcttcgctggggttcctgactcggaacttcgccagttcagggcgtcgatgtaccacgtggaggcccgcatcgtcgatgctgccctccaagtgacagaccgggccctggaagccggggacctggggctggcccggtgggcgttgacccaagggctactggtgtctcccgatcatgaggacctggtcaccggttgtctgcgcaccgagtaccaggccggcaacatggacaaggtttccgagctggtcgatcacctgtcggctaccgcacgacgcctgggcgtcgatttgagcgccgacaccacccggatcatcgactccgttattacccatacacgcaggagagcatcatgatctcccgttgcactcatctccgtcaggaaggttcctatgcaccattatcgtcttggtatcggcactgccctcatcgcggtagcagccgtggccggctgtcgctcaacagactcgacacccacaccacctccatcccgtgtctccgccacgacatcagcgagctctaccctcagcccgaccccgtcagccggagcgatcagtgccgccgacgccgaaaacatctaccgcaccgtccaagctaacaagatcgcactgtacaaaaagggtggcctggcacccggggaacccgcacccgcgacactgtcgaactacgccaccggccaggctctcaccgactacatgacctacatgcaccaaatctcggggcagggcatcaaaatcacatcggggaactcctcggttaccgcggtgcgggagaaaaagggtgataccacctaccccgaagccgctatcgccttggaatcgtgcgaagacgacagttcgattcgtaccgtggaccgccacggaaaggctgatcatggacgcattttccatgtcgacagttggtatgcccgcgataagaagggcaccgtcaagatgatcgcattcaactcaacggaggtccccacatgcgacgtcaagtaatcaccgcggccgtactgggcctggccctggccaccacctccctgcccgccctcgcaggcggcggcgacttgaacggcagtgtggacacggatggccctggttacgatgtgcgtactgaggtggattaccatcacaccaccggtggtgcgggtgggggtgccacgacagggggccatcatgggggcaaaacccacggtgatggtgaaggtgaggctattgatgggcgttctcgcgccgatgccgaagccgaactagacgaagccgaccgtaaccaggacttgacttgtgatgtcttgctcccaccggcgccgaataccccagccggccaggaatgggcgaaagaatgcaatcccccagcgaaaaaggggcagaaggccaccccgaagcccgatccggtgttagtgggccgtcacgcggccttgcagctcacccttcccggcgcggcccctcgtatcgatccgtcccccgaccttaaccggtggcactcggcagcagtgggccaggctttgtggttgtcggttgatgaccccaccgccactacgcagaaatcgatcacgtttatgggccaggttgtctcgttgagcgccaaacgtaacggtttgtcgtttgatatgggtgatggtcatgtcgtgcactgtgatgccacgacgacatggacggagtcggtggaaccggggaccccctcacccacgtgcggttacacctaccaacaggcagccccggccgggggctataaggtcaccgcaatcacgtcgtgggatgtgacctggtcggtactaggacacacgggcacagtccacatccagaaggccggtgggcagatgcttccggtcggcgagttggagtctgttgttacacggcgatgactcctgatagtccgacgctgtatgaggtgttggaggtctgccctgatgccactgatgaccagatcaagacggcgtggcgtcgtgccgcgaaagtgactcaccctgatgccggtggcactagtgaggcgttcgcggccgcccggcacgcctgggaggtgttgtctgatcctgcccggcgcaccgcctacgatgccgacctggcgggggaggatgatcccgacgacgaagccgccgacgccttcgacgttgatccgttcacggcatggccctggtgcgccccgtacatcgacgccacccccaccctgcgccacacctgccccggcacgatcaaggccatcgtggtcgccatcgccgggatcatggccggaatcggctggcaggaagcgctggaggccgtggtgtcgccgccggggtttctgggggcgtgctggatagtctcagtgccggttgtcgtcgcagtgacatggctggcagcggtgacgggtctggcatttttcaccatggcggccatctggtgtggatggtcgttgataggtggtgcgttgctgtggggccagacgtc

SEQ ID NO: 202 - DNA, 12448 bp, Propionibacterium acnes
  source 1..12448: mol_type = genomic DNA
cccatcgtttacatcctcgactggtccctgcgaccagtgaaccgtgcccccactgcgcccacaatgatcagcacacccacggcgatcatcaggtgggcagcactaactgatcccaacggaccaagatcaaacaagccctgcccgggagcgtcgagcagtccgtgggcgcgaagccatgctccgagatgaccgatgattttaggggccatcttcttcagcagggctatccctccgataccaacaacgatgaaggcgaggatttcttcgcatccgttgtttccttctccggtggggccgttcatgctgccttctcggggtggacggccagccagccgatgaggttgtcggcgatctgccctgagatttggatcagttcgacttgcccggcctgccatgcccgcgatgcgccggccagcaatgatgctgggacccctactgcgcggccacgggatgcaacctcagccaaggcggcgcgtaactcctcgacggtgctttcgatgtaccaactgccgtcagtactagtctcagcggcatcggtggtagcgataagagcatcggtgaggtcgtcgacggcgcggtccagatcagcgatgtccggtagggctacagcagtcatggtgtgtcttccttctagggtgccttcactggtgaagggtccctagccccggccgatgtgcggtgctgtgggaaaaatgcttcccattggtccgtcttagttaggaaacttggcctaagtgctgtcgagggtcgcgtgttcgtgaccggttcgaagacactgccgctttgccttcttgtcagtggcgtttccgagatggggtcagtgggcgatggctaggccgatgagggcgccgctgcacaggctgggtgcccaggggaggaatcgggtggtgtggtgtcggaaccggtcgattagggcatatagggcgatcagggtgaggccggctatgaccgtggcgtggatcgtgtcgatgccggttgctgcgaccggggctgcccacagtggtgtgatgcgcacgtcggagaagccgaagccgcctcgggagatgagccaggcgatcatccacgctgcgaagatgatggtggtagcgatgacagcacgtgttgccgcagtctggtccgagagggcggtaacggctacagccccgatccatccggcccatccggtccacgctagggctgccggtatccatgtggtgatggcgtcaatgacggcaacccatgccccgatggtggctagcagggcccacgtcggccacgtgggtgctggggcccacattgtggcggcgatcatggtgaccgcagccgcggcacagaccgcgatcaagcttcggagactgtaggtgtcgcggtaggcgattttgtcgggggtggcggtggccggttcgggcaggatgcgagtgagggagggccatcctgcggtcgcaatggtcacgacggcggcgatccacacgatctggtgcatgggtctcatcatggcccaatatcgatgggtgtgggtggccgacatgggctcagtcgtcgagaggtttgcgggcggttgtggcttcttgggtgccgaggatgagggtgccggagtcgtcgccggctgattcccagtcgacgatgacctggtcgccgtcaacgctggattcggcgatggtcacccattgcccgtccatgtcgatgagcatcccggcggccaggtctgtgacggcaaccgggtggggtgggctgtagaggaggtcgatgtcgcgggcagggtcgtcgggttcttcggttacctcgggtggggtcgatctggctgtctcggtgtcgtcggccaggtccgctcccaggatgcgttcccattcggggctggttttcttgcccgctgaggccatcgtctcgtcgatctgttcgtcagtgggccacacaaatttctttttggtccaggtcgtggtgtcgggtcgcagctgatccagcagttccaggtcttgcggggagtgggccttgcgggggtcgggggtgtagaagaattggacttccttgggggctgattcgccggataggtaggtgcctcggccgcgtttgccgaacgggatgcccacgccgatgtgttcggagccgaacatcatgcgggctccgtcagcggacaggggtccggtggcggcacgcccggagaagttgtctcggatttcgccgcccaggaactcggcgtcggggcgttgggtccccagatcgacgtggatacggcaggcggctgccatgcgcagcagggagccgatccagccgaaaacggggcattctccgggcatcccagagaccttgatcgttgaccaccagtttttcgcgttgccgtagaactggcggtactcgtcgatgaggaccagcacgcgggtgaagtcggtctcgcgggccccttcttcttcgatgcggcggtagcggtcctccatgagagaccacagccagtggatgagggcgacctggtcggggacggtagtggcgaccatctcgatgttgggccactcccgcaggcccaggtactcgatgcgtttagggtcgatgacgaagacgcgccagttgcggcgggcaccctcgacggcgtcgccgatcatggacaccgtttttccggtacgggtgcggccggccttgagctggtgggccatgacaccggagatgtcccagaaacaggtgttgccgtcctcgtcgacggcctgggggattttctcccagtctggggagtctgggcccggaagggccacgggtcggggcaccatcgagggcagggggtggcggcgggtgacggtgatggtgtcgtgttccaggtcgaagtcgctgcgccactggccgagcatcatcgccgaggtcaccgcggccaggcgcaattggatgttcgggctggacaaatgggcgccacgttggtggtgaatggtgaagccgtccaggttcccccgatcggttttccaggaatcgacggtgaccgccgacccatagatctgagtggctacttctttagcccgttccttgtctcggtccagatcggttttgtcagggtcaggggtcggggcgcggtattgcaggacgaaccggccggccgggatcgttgcggatgtcaccgtgaactctgccggcgaccaggcagccgcggccgcctgggtgagggccattggcatggtctcgacggcagcctcctcgggggggatggtgagggtcaggcgtcgcggatgcgtcttcttgcgattccatgtgactttctgcttcaccggcaccttcgccgccgactgaatggctaggcgagctgattcggcagtttcggtacgccggccagcgcgtagcgcccgtcgtgcgtgaaggctgcccaccacagcacagcccatacacggcagccaccagcgcggatcagcggctgctgcatagcccccggtagctagtaccgcacctgaccagccggccgcgatacttttccacgccggtttcgcgccaccaggaccagcgttatggacggtctgcttcgaggctgcggagggacgagacagcggagtgctggtcatgccgcggcctccttgtggcaggtcatttcacaggcatgccggccagcgatgatgccgtggcgcaccgccccggtagccgcatagaccgcgcacaactcaaacacggggcacccatcgcaggccgccgggttcatgctttctttgtcccacgatggtgggtcatcggtgcacggcacggccaggccatcctgttgagcggcgctgatagcggtgaataggcgcagctgggcgcgaacttggtctggggtcaggttgacggtgcgggctacacgcatggggttccttcctcttcaccagtgaaggttccctagacccggccgatgtgcggagggatttcagtgttttatcgaggtgaccagccagccggtctgcgctgcgggttcaggtaccagggtcagatgcagcatggtgtggtcggctaggggcacggcgaccaggggcccgtcggcgctcgccccggtgagggtgggagttccggccacggtggtggcgggaatctggttgggtttcgcggccatcagggagcccatgagggtcggggcggcgatctggacgagggcgactttgcgggcggcgggatcgcgggtcaaccagccgcgggtgaaggtgagcgcagccgacgtgatatcggggctcagcggggctggtgtggcggcggggtgggccgttgaggagggccatacgcgcggtagcgctggcgacatcgagcgggtcggagtggggtcaggtgtagggcttagggtccgatgtggcgatggggctaccgccccggtggtgggagacgagactggttgggggtggtgttgagggcgtgggatcagggtgaaggcagccaaactggccgggatgaggatgacggccgcgccgacacttcggagcgaggtcatgtgacgatccttcggtagctcgacgggttgccgtagatcttttccacgttgatgccactatgtgggttgtcggcgctaaccatttggcctccaccgatgtagacggccacgtggtgggcagggcttccccagaggatgaggtcgccgactttgagctggtcacgggccaccgcggtgccgactttctgctggtcggcggcggtgcggggaaggctaatgccgatacgccggtacagcgccgaggtcaggcctgagcagtcgtagccgccatcggctttgccgttgccaccccacacgtaggcgtaggagttgttgtcggcgatcgatttggcccatgccacggcttcggccaggttcttcgacacaccggtctcgttagcggccccggtggcacagttgtttgacaggtgccctgtagtagtggatcccactatttgtttggccatggtttcccatttggcgtaggcatcgggcagggctgagccttgcactgcctgagctgcctgcgtcagcggcatcttctgccagtcagcgatgtcgactaaaccgggaatgtggaatccagggccgccggccgatccggggccagcgtaggtgatggtgtggcctttcaagaacgcctcggtggcgtaggcatcattgttgacctgatccagagtcccgtaccagcccggcaggatgcgctgctgaaaggggccggcgtcaccgtcaccgttagccttcgctgaggtagggtcggccccaagatctgattcttgtttggcggtcatgatagcgatgaccgctgcctgggtaggcagtttgtcacgctggaccacagtgacgatggtggtcacgagctgcttctgcctggccgtgaggcctccggcacccacagtgcctccggtgacggtacccacgcaagcatccccgccgacactgccaccgccgccgccagagttgtcgtcgagggccccagagcctactgacagcagcggcacaatgatcacggtcgcgggcaagaccgccaggcccgccagcatcagcactgctgcactcaccacggcgatcacgtgagatgctttcaacgctgcccacctttcgctggtttgagggggcgacgcctgctggtacgcacaggcttggttggtccagtccgccgttggttggcaggcctgggtttgatcggcttgctgggacccggtttgggctccggagtcttaggctccggcttcacatgcctaggcacttcggctgcggtgggaggagtcagcacgtggcgtaccggcttggtgaccttctgggcacccgaaacaaccggcttagacaccaccttggcacctttgaccaccggtgcggctgccttcgcgccggccttcttgactgcacgatgcgctttgatagccccggcctcggcccggccaaccctgctagcagtagcatcgagggctctgtggcccgtcgttgccctcaccggtgcatccttgccctggcgggtctgcttagcgatcgccgacatgccgcctcgcaatgccgaaacatgattgtgggcgtgggcgatcgccgacatgccggccgtcgcgatttttgactggccctgcggggcccctgccccagcacgaatctgctggtaagccgccgacgtgccacgagcacccgccgccattcgcgccaccttcgcagccctagtcactcccgtcgacacgccacccgtggctaccgcagcagcacccgagaccacagtcgaggccatccgccttcgacccaatccggtgagcttgcgaccaccgctgcgcaccatccggcgagcaccccgcccagcccactggccaatcgccgacgccccttcggaacgcttgctgcgcatccaatcgttgatcttgtccctcagccccttctcgcccttgtgacgacgccacatggacatcaagaacccgataatccccacgagctcgagcatgttgacaaccatgaccttgatggcgacatcaccgtcagaggcgaaaaccgacttgatgatgagcatgaccacacccaacatcaccatcgacccgacaatgccgatcatcgagtacaagatcgaacacagatcccggatgagcggatctgtgcggccagggatagcccgcaacacgttgagcatcgacatgaacgccgaccacaccaacttgcacacgtagaaccagcacatgcccgcgaacaccagcaggaccacagccaaacccgccaccgtcgacgagtaaaagaagaaccccaccaaccacgaaccatccgcaatatcgccggcgtaatccgacaacccctcatcacagtcaccaaggtcgtcgcgagcatccgagacgtcatcgtaagggccacccttgagcacctcgatgtacttgtcgtggcacttcgcatcaataatgcggccatagttgagctgctgatgaaccggcgccacgaacgagtccacaatgatcgccgacagcttcggatccttcgagtctcccgtcgaggtcatgtcatcaggaatctcgacctcaccagcggtcgccgtcgcaggatcaaccgaactggtaatcatatgagacagcgccacaccgaactgctgggtgcgagccagcggagtagccaacgtcgtcgtatcgcctgcgaacttcgccaccggggccgccaagaaacccaacgccagcgccgcagcaatcgccgcacgcgcacccgtagcccacgcccctgccgtacgtcccctcatcatcttgacgaccacgcccacaccggcgcacgtcgtcagcaacgtcaacaccgttccaccccagctgtccgctcccagcggggccaaaaccttgtcgtggatgtcgttctgtaaccccaccagcggtccggtaatccacccgacccagctcatcgccacggtccagtccaacaaccggcacaacagggcaatgaccatcaggtacgtgttccaacacatgccaataatggaggcccacatagccttcagcggggccgtaacgccaccatcgtccatcgacatctggtactgaaacaagtgaataccgttggagtcagtcacattgaaaccgtcacccatccagcccagccccgggcccgatgccatggcaggcacactgctcagcgccaccaccagaaccagcgtggtgacgatgatacggaaccgccgctccccggccccggggcggcgtggatgacggctcacgctgtctcctggtcgtgctcgggcgggttggagctggcggcttcgcggtggggagcgtaggcaggtctcagtagtcgaatttcaccgacgttgccgtgttggtcggcgtacaggccacaaccggggcctccggggttgagggcaatcttgaccaggtcagcgaactcttcaggggacgttttagggtccacgcccaggaactcgacacctttctgggcgaggttgatgttgtcgcacagcaacacgatgcgatgctgaatgaggttgcggacggtctcgttggggtaatcggcctcggggtcgtgggagccggtgataagccaggcattggctcggcgggattcgcgcacgtactcgtcaatggcgtgggaggcttccggcgaggacgacatgtgatgaaactcgtcaacaatgaaagcggcgtcgcgggcccggtcgctgaagcacaccaggcgagccagacgggcaatgagcgcgtagagggctcggccaaacaccttgtgcgggggcagctgccgaaacagatgttctgacagcatctcctcggcgttaggaagagcgatgccacaagtgccaatgatgaggatgtcggcactcaggtcggcgggaggaaggtccgggtcaaagatggccgaagctagggaggccgagttctcgatgtcagcgaacacggcaatcctgtcagcgatcgcggtggcctcgggaaggtcgcactcctcggccaggtggcgggccaaacgcccacacgaggtgatctggtggtcacgcatgtaggccggtttgaggaccttggccagcgtggtcccggccacaccgatggtctccaagttaagcaaggtcagcaagaacgactgggcgacctgcccggccatctccgggggaaggatgcgcagcgggtccagcgacagcttggggtgggccgtgtcgacgatctggcgtctaaccccgtcgatagagttgacaaaggttacccactcccgctcatcggagttgtcggtggcaataatgcgcccgccccgggccgcgatggctgcgcacagccgcttctcggccatcgtcttgcccgcgcccatcttgccgatgaacgccaccgtgttgcctttctgatcctgagtgtcggcatgcaaatcgaggtaggccagcgactgcaacggggagcctgtgaccacagccaacgggatgccggtggtacggcccaaccggtactcaaccaccgggatagatgcggcgaacgcggaggcgtgagtcagctgacggtaggcgttaagcgaggaggagaaccggccaccgggccgggcagcccacagcaagtcctcctgacggcccacgggacgcacccacgtgaagtcaccgaacaccggatcattgacgaacgctcctgccagctcctcggtggtctcaaagtcaggagacgagacagtgacggtgataagagcctggatctcgacctcacgctcatcggcggccagctcggcgttgtagtcgacgagcacctgagcggaatgctcgatagacatgagggtcgaagcctgggtcatctcaccgccctcgacgttgtcgagctgatcgaccgtttgacggatagcccgctgatttttctgcatcgcagcgtgacgggtccgggccactccccggatcgccacgtcgaccggcacgccagtgtcgtcgatacggcccaaaaactcgtaggcaggccacgtcatcgtgcggggcaccttacccagcacgatatgggactggtagacggtctcgccggtgtcggcaccgattttgaggacgcgacgattccacgcctgagccgtccgggacatgtgggagactcgcttgtcatcctcgctggccagcaggtcggaggtcgcggcctcatcgatgaccaactcccccagcgcggcacgtccaacctcatccatgagggcgattccctcgccaggggcatcatcacgcaaccgggtcgggtggcctgacaggtgctgccgaagccagatctgttcatcaacggtgaccgggcggggttggaacgctgccggcagtttcgcaccgaattccttagcctgacggagggcccactcccgtgcgacacggccaggagcggtggtcatgagtccggcggcttcggtgattttgttgagggcggcggtccaggcggtgtgggtgcgtattttctggtcttggttgagtttgatcgataggaaccacacgcgccggcctagggattcggtttcaggctggtcgagggtggcgtcgatttcgtcggcccacacggggtgttcgctcaggtcgaggccggcggccatggcgtcgacgatttctgtggggtcggtccaggtgagggctccgttgaggcagaactcgtggcgggcgaggtggcggaataggtcgcggtgagctgcggcgacggtgagggaggcgttctcggtgacgggtcgctggaggggagtgagtcgccaggtggcccagatgtcgccggtggaggtccagacgaggttgtcgaagaggaaccgttcggggatggacatcatgactccttttcggcggcggcgaggaaggcttccaggccgctgcggcgtacagcgttcccggtagggtgcaggggttttctgggggtgggttcagatttcgaatgtgggaggggtttgtggatggtatcggtgtcctcggcgagggcttggtcgagcaggcaggtggccggggtgtcggtagtctcgtccagctcgtcgatcatctcgtcgaggaggttgggggtggtggatgcggcccacacaggtgggatagccggtgcgggtcgaggcggtgtggggaggcggagtttggtttggccccagaggggtgtgtgggtcatgccggcgggagtggtggcggcgtgagtggtcacacgccaccagcccgccagccatgccagaggtgaccaggtccagtcgatgcgaccaacaacgaactgggcgagccatccggcagccagcgcgaaaatgaaaccgcggatggtcatgcccccgtcgataattttgaagcccatcattgcggcaggaactacgccgccgacagcgagcacctgatagatcgtgtagggcccgccaggaatccttcgacctgaggaatccttaccgataatgcggggctgctggcgggcctcggtgtgccactgaatatccacgatcagctcttgcccaatccttgcatcatctgtccgaagaattggatcgcgttaccttcgataagccagtgcgccataccacacacaaacagcatggagacgatcttggccaggctcataccgtgtttgaagatgttgaacgcggcaatgcccacgactacgaccatggcgacggctcgcaccgcggactgaccttcacctgccttgatcgtcgtccattcgaagaggttctgcgattccagtggcagcaggaggaattgatcgagcatgagaggttttcctttcaggaagccgaccgggatggtcccggtactgacgggctggacggcacgggtgtgccggccaggggcagaaggcgtgacggctggtcgagggaggcaacctcccagcggcctgcacggctgacaagagtcaggccgtactggctggtccgggtagtggattcgtcgccggtgggctggcatgtcacggtcaccgtgacggtaatcttctgccggtctgagggggtggggacctcgtcaggtcccaccacatgagtggttttcactgatacgcatggggctgggtcaaccgcggtgaaagcggtccctgggctgctccatctcgacaggtcagtattcccggtcagcatggcggttaggaagcctgaagaggcttgggcggccgggtcggcggtgcgaagctccgaggtgtctaaggtgggggccgaggccggtgcaggcatggggatctgtccaggtagacgcaaggcgatggccttgccgttggaatcgacgtggaccgggactgaccaggcctgtccgctcccggattggccgcccatggtgaccacggtgacctgccacaggctcggatcagacggggagacggtagcgtcataggcggtgacggtggtgggcgctggaccaggtttgcggggcatgcgcgcatcggtgatcttggccgccaccaggtgttccagattgtccaagtgcccggagtcagaggtcagcagaagagtagtcacctcgaccgcggtggctgaggcgatctgagctgtgcggcggtcgtgatgggtggtgtcagtgctgacagctgtggtgggagcggatgccggggccgccgaacggaccagggcaacggggccgcatgcgactccgcacagcacgagggcaaggaagcctttggtggccatcgatccggtgtggggccagggacccacgttttcctgtgcctgttttttcttggccgaccaacggcgggacttagggttagcggatgcaccttctggggtgcatgctcgtctcaatcgcatcggtcacctccttcactggatgaagggaccaaggaggtgaccgatgtgcggtcgaacccgaaaaagttcaaacttttttctgggtctgcctcaagtacgacagaaggcctgcatcatcacggcgttgtggtagcagatcttgcgtcagcgcaaatgtatgggcctcgtaggagtagctcttaggtgggtcccggtggttgcggccagggcgagggtgtcgggtatgtgtagcgctagtcccgggttcgtggtgtgagggcttttgggtgctgacatgcactacccattgctagacgctgtgctgtggcatggctggacgtctagcagacgggttgacatcacctttaggctggcagcgcccgaggccgcaggccagaggaagcggacagcctaacgattgacgtccccctctcctttccccaacctcctgga

SEQ ID NO: 203 - DNA, 9476 bp, Propionibacterium acnes
  source 1..9476: mol_type = genomic DNA
tgtgtgggatcagctgtgccgctcccccgacatggcagacagcaccgttgcatgagaactgactgacactgtggcgccgcggaggtctcccgcggcgtccgctggggcgagtgcatgcctgtcagctcatcttttatcgtcatgtttccccttgtcagagcggtctttgcaaagtgacaacgtcaggggtcttgacgacaacatcctcgacaacatcgtggcggtggtctgtgtctcgtcagttcaacgcaccggggaaagaggcaccgctgatgttcaccaccacaaacaccctcaacgatgagtgggaccagattcgcgccactgagatcgattggcatgactgccctgaactgatgcactgcatcgacgttgatgatgtgttggccgtcattcctgccgcccccgacgccatcttgggctacctcattgcccgggctcagggcggtgacgagttggccacccgcactatcatccaagcgttcacaggcaagcttatcttgatggccacggccaccaaggtgcgccgtactaatgacggcttcaatgatctgttggcgggtctgtgggagacgatcatcacgtacccgttggatcgtcgccctgacaagatcgctgcgaacctcatcctcgacacgttgcaccgggttacccggttctggcgtgctgattcccccgatgaggaagaggctcacggtctggtgcccttccctgacactctcatcgccccagagcccgatgaggacgtcacagctagccaggccatcgccttggcggtggaccgcaactggattaccgaggacctagcccgcctcatgagccatatttactgtgacggtatgactggagctgatgcgggtcgtctgcatggctgcgctccagctacggtgcgatctcgatgccgtgatggtcgggccgtgttgcagcgcaacgccgagacgatcctggccgtctgctgatccctctcttgctcatgcctgccgccaccctacccctacctgctagaaacatagccatgtctccagcaacgcatctagcatatcttctagcaattgatctagctatgtatatagctgatgatctagctatcatatagctgtgtctccagcccaaaggacagcccaatggcatgcttgccacaggaaggtgcgtcagcctcccgaaatactggaaggagctttaccgtgcaggacatgacctcgaccagaccgattgaccgatccccgttcgaccgcactattgcggtgtggaaccacaaaggcggcacgttcaagacgtccgtcgtggcgaacctgggatacctgttcgccgccggtggcaacaaggtgctgctggtcgacatggacccccaggccaatctcgacattgacttcggtatacccgcgggagaacgtgaacggggcatgggattagccgaggcgctacgtgaggggacggcccttcccccaccgcagcatctcagcgaaaaccttcacctggtcagtggcggcgctgctctcaacgagttcaccgaccccgcatccttagcggccatcctcgaccgagtcaccaccgcacgctacgacctgctagctcaggcccttgccccgctggcctgggactatgacctcatcttcatcgactccgggccggcacaaactctgctgtcccagaccatccttggagtagcccgctggctggtagtgcccacccgcaccgataacgcctcaatcactggcctcgtcgacgttcaagacgccatcgacggggttgcctcctgcaaccctgaccttcaactactcggcgttgtcctagccggcgtgggggcccgggccacccggatcgccgcagataaacgccacgccatcgacacagtgctgggggcaggaaccgttttcgatgcggtcatccactactccgagaaggtgtccgtgctcgcacgccagcagggcaagaccgtcgccgagctagccaacgagtaccacaacacccagcccgcctacacctacctagctaaaggccagaacatccccaacgtcgccaaggcagccgtcagcatcgaaactgattatctgaggctggccaccgagatcagcgaccgcatgttcaccagcgacgagcaggagcctgatcatgactgacgatccgactccatccgagcagaacaaccccaccagcgacgacatgcgcttggccgaagaatgggccaacagcggccgcacagtgggagccctgccgcgccgtcaacggcctcagcgacccacaccccgcaccaccagccaaccccctgtctcgtcccctgacacaccggctccgaaaaaaccccagaagacccccaccagccagcctggccgtcaacggatcaacgtcaccgtctacgttgtgcccgaactccatgagcggctgcgctcccgatcggcggcgacgggggtgacggtctcggatctggtggtgcatgcgttagcgttcgtcgccgatcatgcgggggaggcgatcgccgatgatctgcgcgtcgagacgggccccggcatgggggccggactgttcgatgtgaccccatcgcggccagtaggggtcgccaaaacccagctgggggtgcgaatgacccgccacaacaaggatggtttggaccagctgacccggacgagtggagcccgtgaccgcagccatcttgtgtctgtcgccgtgcgcgactatctcgactccaaccctgtaaagaaaggccgacatgtccgctgatgaaactcctgccgcccggggtgggcgacgctttgatacgaccgtcaagcccaggcgccgtcccatgcttatcgccgccggtatcgccatcgtgatagtcggcgcgctcctcatcactcagttgattcgctccgcccaaaccgagcatcgcgtgctggaagtccacgccgatgtggctcgcggcgaggtcatccgtgacaccgatctggtatcggtgactgtcggccaggtcgacaacgtatcaacggttcccgcagaccagctcgactcactggtcggcaaacgcgccacggcagatcttcgagccggatcactcttgcctgctggggctatcggcccggccgatgtcgttccagctccgggcaagtcgctggtcgggctgaagctagccgccggacagatccctatcggagaccttgctgccgggacgaagctgcgcctgatccagacgtcggcacccagcggctcatccaccaccactgatagcagcaccaataccgatggccagtcgtgggaggcaacaatggcgaccggcaccaaaaagaccgagcaggtcaccttgatcaacgccgaagtgaactcgcgtgatgccgcccggatcgcccaactgacgtcacagggccgtatcgccgtagtgaaggatccgatccgatgagcaccattgttttgaccagcgtctcgggagccccaggggtcaccacgacagcgatcgggctgggcagggtctggccacaatcgagcctggtcgtcgaggatgacacccaccacgccatgctggcgggctacctgcgagcctcccagcacgccgaaccgaacctggccgcagtggcgaacctgacgtcgactccaaccaacgcccaaacggtgtgggaatctatcgccagacccctacccaccgatgacccagtcggcgggctgcgacgcaaaggcatcctcggcccgcccacgccgtggtctcgcgcaggcatcgacccccgatggggattcatgctggccctgtggcggcaactggaggaggctggcatcgacaccatcatcgatttgggtcgcctagccacaccactgacctcaacgccacacctgatcgccgcacccatcgtcgaggacgccgacatgatcttggtgatgatcgaggcgacactacgcgacatcgccggcgcccgcacgatggtggagggactcgctgagcagatgaacttggccggcgcctaccgacgtctcggactgcttgtccaccgtggcggccaggcccgcggcgtcgccgagttcaatgacaaggagatcacctcggcgttacgactcccggtcatcggggccattacccacgacccggccggagccgcccaactctccgacggggtcgggcagcggttcgacaagtcacgtctggcccactcactatcaaaggtggcggccagcctcgtcgatgccataaacaagcgccacgctgatgacgaggaggatctgtgatggccagttttgctgataatccgttcgacaagctgcgctcccaggatgcggcaagagcttcggtagagcaggagcctgatgccggattagcgtcggagttgttttcgacgtcgtcggggtgggccagctctcagcaggtgtcccaagctcaaccggtgatgacccgttcggagaacgtggattggccggttgtcgcggagctagccagtacggccactgatgaggttgaggctgagatcagcaggtggagttccactcatgatggggtggcgacgctagacattcgccaggccatcgcggagcctgctattgcctcggcggtgtctacgtatgctgaccgacgccagatcgatgtaggggagacctggcctgatctggtacgccagcgataccgcaaggctgtgtgggatcagctgttcgggatggggcggttgcagccgctgttcgaaatcagcgacgccgaaaacatcatcgtggtgggtaaccatgaggtggttgtcgaccacaacgatggttcccggtcaacgctgccgccggtggccgactcggatgccgagctggaatcccagatcgcccggatggcgaggaatgcgaccccgcggcgagccttcgacgccgatcacaccgatgtgacgatcatgcaccaacagaagttccgtatccacgcgatctcttcggaggtgtcgttgcaaccgtcggtggtcatccgccaacatttgctcacccaaatcagtctgggggacctgtcccagcggggaatgatgccggtggaagtggcccggttcctcgatgaggcggtacaagctggcaagtccatcgtggtcgccggcgagcagggggcaggcaagacgacgtttttacgagcgttgatccacgccattccgatgcgggagcggttcgccacgttggagaccgatcaggagttgttcgctcatctgatgcctggccgggaaaacacgctggtgctgttcgcccgtgatggtaacggcgaggtggatccggcgactggcacccagcacggcgctatcgagatcgcccagctgattcctcctagcctgcgccaggcgttaactagggtcattgtcggtgaggtgcgcggcaatgaggcttcggccatgttccaggctatgcagtcggggactggcactatgagcagtatccactccccgcgagcctctgaggtgccgtcccggctagcccaaatgatttcgatgggcccggtctacgatctggatcaggccatgctgcagatcggtcattcgatcgactacatcgtctttgttcgtaagcgtgacctgcctgatgggagccggctgcgatttgttgagcagatccgttcagtctcgcctggtgattcgacaactcccagtcttggcgaggtgtacacggctgactcgtggacaggccagccgcttacgccactcatgcctggttcggccgccgacgagctgtctcacttcgcccgagacctggattactgcgaggcccactcatgaacactcccgcactaaccagcgccctcatcgtgaccgggttggggctgatcctggccatcgacgggctggtcccggcgccgcctcgacctggtgccccgctgagcccggcccagaggtgggctcggctcacccaccgtcccacaggagcggccgggcgtcgccgggatttgcgttgggggttggctgttctcgtcggcgtcgtgctgtttgtgctcaccgggtgggtggctgcgctggcgttgggccccatcattgtgttgttggcccccaccctgctgggggcggccccaccgaccgatattccgctgatggaggcgttggatcggtgggtgcgtcaggtcgctgcggtgctgccacaggggcgagacatcatcacagcggtgcggatctcacggccgcgggccccgaagctgatcgccgggtcggtggatcaactggtgtcccggttggatggccgtatggagccgagggaggcgttccagcggatggccgacgagctggactcggctgaggctgacgcggtgctggcctcactagcgttggcggccactcatccgcggggagcctcgacaacgttgaaggctattgctggcaacatccaacagcggttgaaagtgctgcggcaggtggaggctgagcggtctaagccgcgtaactcggtgcgccagatcacactggtcacgatcgccatgttcggggggctgctcgtgatcggacggtcgtttctggccccgctggcgacccctcccggtcaggtgctggtggccgtggcggtggtcatgtatgtcatcgcactagtgcagatgtatcggatggcgcggccccgtcgacgcacccggatcatggtcaggaggacccgatgaccattactgctttgtccctgctggccggggccatcgtcactgtcggactgctggtcatcgtggcagcgttccgcccagccccaggccctgacctggttgccgctctggaggtggtgtcgggtcgcacctcaagcgtcgccgagaacgtcgaccagacccggatcgggcggataggtcgcagcgtgacccgcacattccatgtgtcggtgtccccggccatgcgggccgcactgcgactccaaggcacgacccccgaagcgttctacggtcgacgcctgatctgcgcactgatcggggcgatcctgccgtggctgctcaacgcggtagccatcgcggtaggggcgaattccccgaacctactcatcccttcggcgctgtgtgtggcgttagctggcgctggatggatgctgccggcagcacggttgaaggctgcggccgggcccaccaacgatgactcgttcgaagcgctgctggtattcatcgatttggtcgtgctggaacggctcgccaacgaaacctccgtcgacgcgctcaccaatgcggcaaacatgtcggactcgccgctattcgtccagatccgtcaagtcctcaaccgtgcctccctggaaaacgtcgacccgtggaacgggctagaccggctagccgaggacatcaaactgcccgaactcaccgatgtggtctccatcgcccgcctccaaaacgaaggcgcctccctcgtcgacagtttccgggcccgagtcgccgagttgcgcgacgcctacctgctgcgcctgcaacaagaatccaccgccatcacccagcggcttggtttgtggacgatcctgcaagccggctcggtcatgctcatcttgctgggggcggccgccctcacactcatcacagccggataaaccgacatcgtgtcgagcccccatatgggccgcgaacctttcataatgatgcctgtaagcaccacaatattgatcacaacctaacaatgaaggagaaatcatgatgaccgatctcgacctggctaaaaaacagatcacctggctggcggcgcacctgcgttcccggatcgttgacgagcgtggcggtggtagctctaccgtggagacactgatttggattggtgtcatcgtggcgctggtgattggtgtgggcgtcggggtgacggcctatatcaggtcgaagatgcctcactgacgacgatgcgtagcaggttcacaactgatcagcgtggcggtggtagcgcgtcggtggggatgctcctgctgatgcctgcgatcatgctgctggcattcggtgggatcgaggtcgggatgtggtgtcacgcccatcagtcgaccatcgcggcagcccaaagcgccgcggaggctcagcgtgtcgtccatccggtcccggggtcggcacaggaggcagcctcgcagatcactagtcatggcggggtgcgtgatacccggatatcggtcagtgatgacggggccactgtcacggtgaccgtctcaggtcgggccccatcgatgctggggctgcatcttccggctgtgtcgtcgacagcgtcgatgcccaaggagcgcctgtcgtgaggcgaagtgagcgcggtggagcaagtctaagcgtcgaggtgctcatgtgggcgccgatcgcgctggtgatcatcgggtttgttgtgggtatcggccggatgtcgatggcccaggacgcggtgaatggcgcggcgggtgctgcggcccgtgcggcgtcgttggagcgtgatggacagtcggctcagtctgcggcgcagcaggcggcgtcggcgaacctgtcgtccggtgggctggcatgtgcgccgagtgtgagcgtggacacgtcagtgtttgcccgtcctgccgggcaggcgggcacggttcacgccacggtcacgtgtgtcacctcgctgggtcttgggttcgggtcccggacggtgcacgcaacggggtctgccccggtagacacctatcgggaaaggagaggctgagatggcccgtgatgagcgtggtggcggctcggtgtcggtgtggatgctgctcatggtgccggtgattctggtcatggccggcctggtttttgacgggtcccgtcagatatcggcaacccaggcggcccaggacgcggcggttgcggcatcccgcgccggaactgatgcggcagcgacaccgcagcttgctggccacgacggggcggccgtagcagtccaagcggcccgccaggcactatctgctgccggggtggacgggtcggtgcaggaggacgggtcgaccatcacggtgaccacgtctcaaagtcggccgacagtgttcctgtcagcgatcggaatcagccaggtaagggggcatgggcaggcccatgctcagcttgtgggaccgggagaacgcccatgacagtgatacgtcgtatcggtgccctggtggcactgctggtggtgatagccggcttaccggccgggctcgtggccgcaggcgccccgctagtaccctcgggcctgtcatgggcccatgtgcggcatctgttggttaccccagacatgaccgggtcggtgctggtgtggctggtcagcctcatcggctggatcgggtgggcatggttcgccctggccgtcgcagccgaagcggtgacgatgctctcagggcagcggctgcactggcacatgcccggccctcgcctagtgcgccgagtggcagccggtcttctcattgccgcgttcgcggccgcaccggcagccacaagcacggctcacgccgccgaggccacccatgtggcggtcgccgcccaggctggaccggcacacgcggcccccgcccaggacagccccgccaccacctctcaggccccggacgcctccaccactccgaaaatctggaagacctacacggtgcgggccaacgactacctgtggaagatcgccgagcactactacggtgacggcgcc

SEQ ID NO: 204 - DNA, 12539 bp, Propionibacterium acnes
  source 1..12539: mol_type = genomic DNA
ccccaatgcccccacaacgatcagcacaccaacagcgatcatcaggtgggcagcactaactgatcccaacggaccaagatcaaacaagccctgcccgggagcgccgagcagtccgtgggcgcgaagccatgctccgagattgccaatgatcttggggatcatcttgttcagtagggctatccctccgatgccgacaacgaggaagacgaggatttcttcgcctgcgttgtttcttcctgtgtttgcggtcatgctgccttctcggggtggatggccagccagctgatgaggttgtcggtgatctgccctgagatttggatcagttcgacttgcccggcctgccatgcccgcgatgtgccggccagcaatgatgctgggacccctactgcgcggccacgggatgcaacctcagccaaggcggcgcgtaactcctcgacggtgctttcgatgtaccaactgccgtcagtactagtctcagcggcatcggtggtagcgataagagcatcggtgaggtcgtcgacggcgcggtccagatcagcgatgtccggtagggctacaggagtcatggtgtgtcttccttctagggtgccttcactggtgaaggttccctagacccggccgatgtgcggttctgtgggaaaaatgcttcccattggtccgtcttagttaggaaacttggcctaagtgctgtcgagggtcgcgtgttcgtgaccggttcgaagacactgccgccttgccttcttgcccgtggcgtttccgagatggggtcagtgggcgatggctaggccgatgagggcgccgctgcacaggctgggtgcccaggggaggaatcgggtggtgtggtgtcggcagcggtcgatgagggcatatagggcgatcagagtcagcccggctatgacagtgacctggatcgtgtcgatgccggttgctgcggccggggctgcccacagtggtgtgatgcgcacgtcggagaagccgaagccgcctcgggagatgagccaggcgatcatccacgctgcgaagatgatggcggtagcgatgacagcacgtatcgccgcagtatggtccgagagggcggtaacgactacagccccgatccatccggcccatccggtccacgctaggactgccggtatccatgtggtgatggcgtcaatgacggcaacccatgccccgatggtggctagcagggcccacgtcggccacgtgggtgctggggcccacattgtggcggcgatcatggtgaccgcagccgcggcacagaccgcgatcaagcttcggagactgtaggtgtcgcggtagacgatcttgtcggggctggcggtagctggttcgggcaggacgcgggtgagggcaggccatcctgcgaccgcaatagccgcgacggcgaccacccacacgatctgttgcatgggtctcatcatggcccatcatcgatgagtatgggtggccgacatggggtcactcgtagaggggatcgaggggtgtgcgggcgagcatggcttcctgtgtgccgagcatgagggtgccagaatcctcgccagccgattcccagtcgacgatgacctggtcgccgtcaacgctggattcggcgatggtcacccattgcccgtccatgtcgatgagcatcccggcggccagctctgtggcggcaaccgggtgggctgggctgtagaggaggtcgatgtcgcgggcagggtcgtcgggttcttcggttacctcgggtggggtcgatctggctgtctcggtgtcgtcggccaggtcggctcccaggatgcgttcccattcggggctggttttcttgcccgctgaggccatcgtctcgtcgatctgttcgtcagtgggccacacaaatttctttttggtccaggtcgtggtgtcgggtcgcagctgatccagcagttccaggtcttgcggggagtgggccttgcgggggtcgggggtgtagaagaattggacttccttgggggctgattcgccggataggtaggtgccgcggccgcgtttgccgaacgggattcccacgccgacgtgttcggagccgaacatcatgcgggctccgtcagcggacaggggtccggtggcggcacgcccggagaagttgtctcggatttcgccgcccaggaactcggcgtcggggcgttgggtccccagatcgacgtggatacggcaggcggctgccatgcgcagcagggagccgatccagccgaaaacggggcattctccgggcatcccagagaccttgatcgttgaccaccagtttttcgcgttgccgtagaactggcggtactcgtcgatgaggaccagcacgcgggtgaagtcggtctcgcgggccccttcttcttcgatgcggcggtagcggtcctccatgagagaccacagccagtggatgagggcgacctggtcggggacggtagtggcgaccatctcgatgttgggccactcccgcaggcccaggtactcgatgcgtttagggtcgatgacgaagacgcgccagttgcggcgggcaccctcgacggcgtcgccgatcatggacaccgtttttccggtacgggtgcggccggccttgagctggtgggccatgacaccggagatgtcccagaaacaggtgttgccgtcctcgtcgacggcctgggggattttctcccagtctggggagtctgggcccggaagggccacgggtcggggcaccatcgagggcagggggtggcggcgggtgacggtgatggtgtcgtgttccaggtcgaagtcgctgcgccactggccgagcatcatcgccgaggtcaccgcggccaggcgcaattggatgttcgggctggacaaatgggcgccacgttggtggtgaatggtgaagccgtccaggttcccccgatcggttttccaggaatcgacggtgaccgccgacccatagatctgagtggctacttctttagcccgttccttgtctcggtccagatcggttttgtcagggtcaggggtcggggcgcggtattgcaggacgaaccggcccgccgggatcgttgcggatgtcaccgtgaactctgccggcgaccaggcagccgcggccgcctgggtgagggccattggcatggtctcgacggcagcctcctcgggggggatggtgagggtcaggcgtcgcggatgcgtcttcttgcgattccatgtgactttctgcctcaccggcaccttcgccgccgactgaatggctaggcgagctgattcggcagtttcggtacgccggccagcgcgtagcgcccgtcgtgcgtgaaggctgcccaccacagcacagcccatacacggcagccaccagcgcggatcagcggctgctgcatagcccccggtagctagtaccgcacctgaccagccggccgcgatacttttccacgccggtttcgcaccaacagtcggggcagacgctggccgcttcgagaccgaggagggacgagacaagggagtgctggtcatgccgcggcctccttgtggcaggtcatttcacaggcatgccggccagcgatgatgccgtggcgcaccgccccggtagccgcatagaccgcgcacaactcaaacacggggcacccatcgcaggccgccgggttcatgctttctttgtcccacgatggtgggtcatcggtgcacggcacggccaggccatcctgttgagcggcgctgatagcggtgaataggcgcagctgggcgcgaacttggtctggggtcaggttgacggtgcgggctacacgcatggggttccttcctcttcaccagtgaaggttccctagacccggccgatgtgcggagggatttcagtgttttatcgaggtgaccagccagccggtctgcgctgcgggttcaggtaccagggtcagatgcaccacggtgtggtcggctaggggcacggcgaccaggggcccgtcggcgctcgccccggtgagggtgggagttccggccacggtggtggcgggaatctggttgggtttcgcggccatcagggagcccatgagggtcggggcggcgatctggacgagggcgactttgcgggcggcgggatcgcgggtcaaccagccgcgggtgaaggtgagcgcagccgacgtgatatcggggctcagcggggctggtgtggcggcggggtgggccgttgaggagggccatacgcgcggtagcgctggcgacatcgagcgggtcggagtggggtcaggtgtggggcttagggtccgatgtggcgatggggctaccgccccggtggtgggagacgagactggttgggggtggtgttgagggcgtgggatcagggtgaaggcagccaaactggccgggatgaggatgacggccgcgccgacacttcggagcgaggtcatgtgacgatccttcggtagctcgacgggttgccgtagatcttttccacgttgatgccactatgtgggttgtcggcgctaaccatttggcctccaccgatgtagacggccacgtggtgggcagggcttccccagaggatgaggtcgccgactttgagctggtcacgggccacagcagtgccgactttctgctggtcggcggcggtgcggggaaggctaatgccgatacgccggtacagcgccgaggtcaggcctgagcagtcgtagccgccatcggctttgccgttaccaccccacacgtaggcgtaggagttgttgtcggcgatcgatttggcccatgccacggcttcggccaggttcttcgacacaccggtctcgttagcggccccggtggcacagttgtttgacaggtgccctgtagtagtggatcccactatttgtttggccatggtttcccatttggcgtaggcatcgggcagggctgagccttgcactgcctgagctgcctgcgtcagcggcatcttctgccagtcagcgatgtcgactaaaccgggaatgtggaatccagggccgccggccgatccggggccagcgtaggtgatggtgtggcctttcaagaacgcctcggtggcgtaggcatcattgttgacctgatccagagtcccgtaccagcccggcaggatgcgctgctgaaaggggccggcgtcaccgtcaccgttagccttcgctgaggtagggtcggccccaagatctgattcttgtttggcggtcatgatagcgatgaccgctgcctgggtaggcagtttgtcacgctggaccacagtgacgatggtggtcacgagctgcttctgcctggccgtgaggcctccggcacccacagtgcctccggtgacggtacccacgcaagcatccccgccgacactgccaccgccgccgccagagttgtcgtcgagggccccagagcctactgacagcagcggcacaatgatcacggtcgctggcaagaccgccaggcccgccagcatcagcactgctgcactcaccacggcgatcacgtgagatgctttcaacgctgcccacctctcgctggtttgagggggcgacgcctgctggtacgcacaggcttggttgatccagtccgccgttgattggcaggcctgggtttgatcggcttgctgggacccggtttgggctccggagtcttaggctccggcttcacatgcctaggcacttcggctgcggtgggaggagtcagcacgtggcgtaccggcttggtgaccttctgggcacccgaaacaaccggcttagacaccaccttggcacctttgaccaccggtgcggctgccttcgcgccggccttcttgactgcacgatgcgctttgatagccccggcctcggcccggccaaccctactagcagtagcatcgagggctctgtggcccgtcgttgccctcaccggtgcatccttgccctggcgggtctgcttcgcgatcgccgacatgccgcctcgcaatgccgaaacatgattgtgggcgtgggcgatcgccgacatgccggccgtcgcgatttttgactggccctgcggggcccctgccccagcacgaatctgccggtaagccgccgacgtgccacgagcacccgccgccattcgcgccaccttcgcagccctagtcactcccgtcgacacgccacccgtggctaccgcagcagcacccgagaccacagtcgaggccatccgccttcgacccgatccggtgagcttgcgaccaccactgcgcaccatccggcgagcaccccgcccagcccactggccgatcaccgagcccctttcggaacgcttgctgcgcatccaatcgttgatcttgtccctcagccccttctcgcccttgtgacgacgccacatggacatcaagaacccgataatccccacgagctcgagcatgttgacaaccatgaccttgatggcgacatcaccgtcagaggcgaaaaccgacttgatgatgagcatgaccacacccaacatcaccatcgacccgacaatgccgatcatcgagtacaagatcgaacacagatcccggatgagcggatctgtgcggccagggatagcccgcaacacgttgagcatcgacataaacgccgaccacaccaacttgcacacgtagaaccagcacatgcccgcgaacaccagcaggaccacagccaaacccgccaccgtcgacgagtaaaagaagaaacccaccaaccacgaaccatccgcaatatcgccggcgtaatccgacaacccctcatcacagtcaccaaggtcgtcgcgagcatccgagacgtcatcgtaagggccacccttgagcacctcgatgtacttgtcgtggcacttcgcatcaataatccggccatagttgagctgctgatgaaccggcgccacgaacgagtccacaatgatcgccgacagcttcggatccttcgagtctcccgtcgaggtcatgtcatcaggaatctcgacctcaccagcggtcgccgtcgcaggatcaaccgaactagtaatcatccgagacagcgccacaccgaactgctgggtgcgagccaacggagtagccaacgtcgtcgtatcgcctgcgaacttcgccaccggggccgccaagaaacccaacgccagcgccgcagcaatcgccgcacgcgcacccgtagcccacgccccagccgtacgtcccctcatcatcttgacgaccacgcccacaccggcgcacgtcgtcagcaacgtcaacaccgttccaccccagctgtccgctcccagcggggccaaaaccttgtcgtggatatcgttctgcaaccccaccagcgggccggtaatccacccgacccagctcatcgccacggtccagtccaacaaccggcacagcaacgcaatgaccatcaggtacgtgttccaacacataccaataatggaggcccacatagccttcaacggggccgtaacgccaccatcgtccatcgacatctggtactgaaacaagtgaataccgttggagtcagtcacattgaaaccgtcacccatccagcccagccccgggcccgacgccatagcaggcacactgctcagcgccaccaccaaaaccagcgtggtgacgatgatacggaaccaccgctccccggccccggggcggcgtggatgacggctcacgctgtctcccggtcgtgctcgggcgggttggagctggcggcttcgcggtggggagcgtaggcaggtctcagtagtcgaatttcaccgacgttgccgtgctgatcggcgtacaggccacaaccggggcctccggggttgagggcaatcttgaccaggtcagcgaactcttcaggggacgttttagggtccacgcccaggaactcgacacctttctgggcgaggttgatgttgtcgcacagcaacacgatgcgatgctgaatgaggttgcggacggtctcgttggggtaatcggcctcggggtcgtgggagccagtaatgagccaggcgttggctcggcgggattcgcgcacgtactcatcgatggcgtgggaggcttccggcgaggacgacatatggtggaactcgtcaacgatgaaagcggcgtcgcgggcccggtcgctgaagcacaccaggcgagccagacgggcaataagcgcgtagagggctcggccaaacaccttgtgcgggggcagctgccgaaacaaatgttctgacagcatctcctcggcgttaggaagagcgatgccacaagtgccaatgatgaggatgtcggcactcaggtcggcgggaggaaggtccgggtcaaagatggccgaagctagggaggccgagttctcgatgtcagcgaacacggcaatcctgtcagcgatcgcggtggcctcgggaaggtcgcactcctcggccaggtggcgggccaaacgcccacacgaggtgatctggtggtcacgcatgtaggccggtttgaggaccttggccagcgtggtcccggccacaccgatggtctccaagttaagcaaggtcagcaagaacgactgggcgacctgcccggccatctccgggggaaggatgcgcagcgggtccagcgacagcttggggtgggccgtgtcgacgatctggcgtctaaccccgtcgatagagttgacaaaggttacccactcccgctcatcggagttgtcggtggcaataatgcgcccgccccgggccgcgatggctgcgcacagccgcttctcggccatcgtcttgcccgcgcccatcttgccgatgaacgccaccgtgttgcctttctgatcctgagtgtcggcatgcaaatcgaggtaggccagcgactgcaacggggagcctgtgaccacagccaacgggatgccggtggtacggcccaaccggtactcaaccaccgggatagatgcggcgaacgcggaggcgtgagtcagctgacggtaggcgttaagcgaggaggagaaccggccaccgggccgggcagcccacagcaagtcctcctgacggcccacgggacgcacccacgtgaagtcaccgaacaccggatcattgacgaacgctcctgccagctcctcggtggtctcaaagtcaggagacgagacagtgacggtgataagagcctggatctcgacctcacgctcatcggcggccagctcggcgttgtagtcgacgagcacctgagcggaatgctcgatagacatgagggtcgaagcctgggtcatctcaccgccctcaacattgtcgagctgatcgacggtttggcggatggcccgctgatttttctgcatcgcagcgtgacgggtccgggccactccccggatcgccacgtcgaccggcacgccagtgtcgtcgatacggcccaagaactcgtaggcaggccacgtcatcgtgcggggcaccttacccagcacgatatgggactggtagacggtctcgccggtgtcggcaccgattttgaggacgcgacgattccacgcctgagccgtccgggacatgtgggagactcgcttgtcatcctcgctggccagcaggtcggaggtcgcggcctcatcgatgaccaactcccccagcgcggcacgtccaacctcatccatgagggcgattccctcgccaggggcatcatcacgcaaccgggtcgggtggcctgacaggtgctgccgaagccagatctgttcatcaacggtgaccgggcggggttggaacgctgccggcagtttcgcaccgaattccttagcctgacggagggcccactcccgtgcgacacggccaggagcggtggtcatgagtccggcgacttcggtgattttgttgagggcggcggtccaggcggtgtgggtgcgtattttctggtcttggttgagtttgatcgataggaaccacacgcgccggcctagggatgcggtttcaggctggtcgagggtggcgtcgatttcgtcggcccacacggggtgttcgctcaggtcgaggccggcggccatggcgtcgacgatttctgtggggtcggtccaggtgagggccccgttgaggcagaactcgtggcgggcgaggtggcggaataggtcgcggtgagctgcggcgacggtgagggaggcgttctcggtgacgggtcgctggaggggagtaagtcgccaagtggcccagatgtcgccggtggaggtccagacgaggttgtcgaagaggaaccgttcggggatggacatcatgactccttttcggcggcggcgaggaaggcttccaggccgctgcggcgtacagcgttcccagtagggtgcaggggttttctgggggtgggttcagatttcgaatgtgggaagagtttgtggatggtatcggtgtcctcggcgagggcttggtcgagcaggcaggtggccggggtgtcggtcatctcgtccagctcgtcgatcatctcgtcgaggaggttgggggtggtggatgcggcccacacaggtgggatagccggtgcgggtcgaggcggtgtggggaggcggagtttggtttggccccagaggggtgtgtgggtcatgccggcgggagtggtggcggcgtgagtggtcacacgccaccagcccgacagccatgccagaggtgaccaggtccagtcgatgcgaccaacaacgaactgggcgagccatccggcagccagcgcgaaaatgaaaccgcggatggtcatgcccccgtcgataattttgaagcccatcatcgcggcaggaactacaccgccgacagcgagcacctgatagatcgtgtagggcccgccaggaatccttcgacctgaggaatccttgccgataatgcggggctgctggcgggcctcggtgtgccactgaatatccacgatcagctcttgcccaatccttgcatcatctgtccgaagaattggatcgcgttaccttcgataagccagtgcgccataccacacacaaacagcatggagacgatcttggccaggctcataccgtgtttgaagatgttgaacgcggcaatgcccacgactacgaccatggcgacggctcgcaccgcggactgaccttcacctgccttgatcgtcgtccattcgaagaggttctgcgattccagtggcagcaggaggaattgatcgagcatgagaggttttcctttcaggaagccgaccgggatggtcccggtactgacgggctggacggcacgggtgtgccggccaggggcagaaggcgtgacggctggtcgagggcggcaacctcccagcgtcctgcacgactgacaagagtcaggccgtactggctagtccgggtagtggattcgtcaccggtgggctggcatgtcacggtcaccgtgacggtaatcttctgccgatctgagggggtggggacctcgtcaggccccaccacatgagtggttttcaccgatacacacggggctgggtcaaccgcggtgaaagcggtccccgggctactccatctcgacaggtcagtattcccggtcagcatggcggccaagaaacccgaagaggtctgggcagccgggtcagcaggacgaatctccgaggagtccacgtcgggggctgaggccggtgcaggcatggggatctgcccaggtagacgcaaggcgatggccttgccgccggcatcgacgtggaccggaaccgaccaggcctgtccgctcccggattggccgcccatggtgaccacggtgacctgccacaggctcggatcagacggggagacggtagcgtcataggcggtgacggtggtgggcgctggaccaggtttgcggggcatgcgcgcatcggtgatcttggccgccaccaggtgttccagattgtccaagtgcccggagtcagaggtcagcagaagagtagtcacctcgaccgcggtggctgaggcgatctgagctgtgcggcggtcgtgatgggtggtgtcagtgctgacagctgtggtgggagcggatgccggggccgccgaacggaccagggcaacggggccgcatgcgactccgcacagcacgagggcaaggaagcctttggtggccatcgatccggtgtggggccagggacccacgttttcctgtgcctgttttttcttggccgaccaacggcgggacttagggttagcggatgcaccttctggggtgcatgctcgtctcaatcgcatcggtcacctccttcactggatgaagggaccaaggaggtgaccgatgtgcggtcgaacccgaaaaagttcaaacttttttctgggtctgcctcaagtacgacagaaggcctgcatcatcacggcgttgtggtagcagatcttgcgtcagcgcaaatgcatgggcctcgtaggagtagctcttaggtaggtcccggtggttgcggccagggcgagggtgtcgggtatgtgtagcgctagtcccgggttcgtggtgtgagggcttttgggtgctgacatgcactacccattgctagacgctgtgctgtggcatggctggacgtctagcagacgggttgacatcacctttaggctggcagcgcccgaggccgcaggccagaggaagcggacagcctaacgattgacgtccccctctcctttccccaacctcctggagtcgatgacccggagatagatcgatgtctatgcatcggtgcatcgatatacctatgtatctgtctgtggtttttagaggccactcccgtcgccccgggccgctcagcgataccgcaaggctgtgtgggatcagct

SEQ ID NO: 205 - DNA, 2061 bp, Propionibacterium acnes
  source 1..2061: mol_type = genomic DNA
gcgagccacgaccatcgccaagctgaatggagagcgagcatgagcaccacccctgccgggttcgacttcgacgctctggccgagtgggccgagagcgatgaggcgacccacaccccgcaaaccagccctgtgttccggggcaaggacgccgcgcgcgccagccgcgcattcctcggccgaggacggcccaccctcggcgcggaccacgccaccggtgagggccggtcgccccgccgtcaggtacggctcgacgcacgcaccaacgcgcgactcgacgcctacgcagccgcaaccggcaccagcgcctcccagatcatccgcgacgccctcgctgactacctgcccgcctgatcccaccccaatccactcgggcgcctgtcagtgcccccctcttctgggtggtggtccggggcgtcaccgccccggaccagttgggtagtcatctcagttgaaataagcgattagtgatacgcccctcctgctttccggtgctgtcatgagcgtctgacaacagcgacacctcggggcagccgacggacagtcctctggctgccgctctgatcccatgcccacggcacgaaggtgtcggacagctcggtctcatcatgtgcccaaatagcgtcgtgggcctgtcgccaagcttctcgggagccccacacgggcacgaccgggccacaccggtgtcctggtctccagtgtcgcgacactgtcgatttcggtacgtgcaatgcggcggcggtttgacggatcgacatcccagactcccgcgcgtcccagatcgccatgtggagagtatttgcctccagtgcggccgccacacttgcacgctctcgcgcacgctcgaatgcccgcctagtgctctcaaatgtcgtcacgacgcctccccctgaaaatactcagggtgtcccacggtgggacaccctgagtatttcataccccaactcgcctcaccacacgtcgacctcgacaccgatcaagcgacccgtatcagcgacattgccgtaccgctgacccgcctggtcctctagccacgacaacgcatcccgaaacagcccgacgtcttccaaagctaaaccacagtcgtagccgcccttatcccccaaccgcaccatctggagctcccggtggcctccctcgtcgacctcgatccacagtttcgcgtgcatccgctggcctcggccctctgacaggatctcggtgagcagatcggacgcctgccctcgcgcatcctcgttactgcgggggaattggagtatgtgggaggaacgatgatgggggaggttggtgacctcatggcgcagcaggttgcgcttgtgcatctgctggtcgagacggtcgggctgacctgttgacggggttgtgccgtggcggcgtttcctcggcggggtctcgatccgttgctcttccggcggttcggcgtcaggttgtggtgcgcgatctcccctaggacgggggggctcgccacctatatccgagggacgatgagacggccttccacgcttgctgcgcactttcgcagcccgccccttgcggtcacgtcgacgcggcggcggagtgacgtcctcaccgcgcgctaactgtgttaacgcctcgaccaggttggtgcccggtttcagcccttttagcacgaaccgcaccaggcgggggtctcggccgattcgtcgggcaatctcggcttggctccacccttcggctaacagggtgcgcaacaagtcttgggcccggttatcacgctcagtcactggtcgcctcctcggggagtcctgcctgctcggcctgctctgatagagcagcccgttccgatccggtctgaggcgctttcaggggaccgggtaggacacctttgacacgcagtcgcccgtccttgccgtcatcgccgcccccctgggccacagggagcgcccaggggggcacgttgctggtgtagatggcgtcgccgtggatagccagcagggtgcgggagttcatgcgtagtgctcctcccttggttgtggcgttttttccggtggtggggtcggcgatgggtgtgttgagggtgcgtacgcgggacagggcccagat

SEQ ID NO: 206 - DNA, 12531 bp, Propionibacterium acnes
  source 1..12531: mol_type = genomic DNA
ccccaatgcccccacaacgatcagcacacccacggcgatcatcaggtgggcagcactaactgatcccaacggaccaagatcaaacaagccctgcccgggagcgccgagcagtccgtgggcgcgaagccatgctccgagattgccaatgatcttggggatcatcttgttcagtagggctatccctccgatgccgacaacgaggaagacgaggatttcttcgcctgcgttgtttcttcctgtgtttgcggtcatgctgccttctcggggtggatggccagccagctgatgaggttgtcggtgatctgccctgagatttggatcagttcgacttgcccggcctgccatgcccgcgatgtgccggccagcaatgatgctgggacccctactgcgcggccacgggatgcaacctcagccaaggcggcgcgtaactcctcgacggtgctttcgatgtaccaactgccgtcagtactagtctcagcggcatcggtggtagcgataagagcatcggtgaggtcgtcgacggcgcggtccagatcagcgatgtccggtagggctacaggagtcatggtgtgtcttccttctagggtgccttcactggtgaagggtccctagccccggccgatgtgcggttctgtgggaaaaatgcttcccattggtccgtcttagttaggaaacttggcctaagtgctgtcgagggtcgcgtgttcgtgaccggttcgaagacactgccgccttgccttcttgtcagtggcgtttccgagatggggtcagtgggcgatggctaggccgatgagggcgccgctgcacaggctgggtgcccaggggaggaatcgggtggtgtggtgtcggaaccggtcgatgagggcatatagggcgatcagggtgaggccggctatgacagtgacctggatcgtgtcgatgccggttgctgcggccggggctgcccacagtggtgtgatgcgcacgtcggagaagccgaagccgcctcgggagatgagccaggcgatcatccacgctgcgaagatgatggcggtagcgatgacagcacgtgttgccgcagtatggtccgagagggcggtaacgactacagccccgatccatccggcccatccggtccacgctaggactgccggtatccatgtggtgatggcgtcaatgacggcaacccatgccccgatggtggctagcagggcccacgtcggccacgtgggtgctggggcccatgctgtggcggtgatcatggtgagtgctgctgcgctacagaccgcgatcaagcttcggaggctgtaggtgtcgcggtaggcgatcttgtcggggctggcggtgggtggttcgggcaggatgtgggtgagggcaggccaccctgcgaccgcaatagccgcgacggcgaccacccacacaatctgttgcatgggtctcatcatggcccatcaacgatgagtatgggtggccgacatgggctcagtcgtcaagaggtgtacgggcggttgtggcttcttgggtgctgagcatgagggtgccagaatcctcgccagccgattcccagtcgacgatgacctggtcgccgtcaacgctggattcggcgatggtcacccattgcccgtccatgtcgatgagcatcccggcggccagctctgtggcggcaaccgggtgggctgggctgtagaagcggtcgatgtcgcgggcagggtcgtcgggttcttcggttacctcgggtggggtcgatctggctgtctcggtgtcgtcggccaggtcggctcccaggatgcgttcccattcggggctggttttcttgcccgctgaggccatcgtctcgtcgatctgttcgtcagtgggccacacaaatttctttttggtccaggtcgtggtgtcgggtcgcagctgatccagcagttccaggtcttgcggggagtgggccttgcgggggtcgggggtgtagaagaattggacttccttgggggctgattcgccggataggtaggtgccgcggccgcgtttgccgaacgggattcccacgccgacgtgttcggagccgaacatcatgcgggctccgtcagcggacaggggtccggtggcggcacgcccggagaagttgtctcggatttcgccgcccaggaactcggcgtcggggcgttgggtccccagatcgacgtggatacggcaggcggctgccatgcgcagcagggagccgatccagccgaaaacggggcattctccaggcatcccagagaccttgatcgttgaccaccagtttttcgcgttgccgtagaactggcggtactcgtcgatgaggaccagcacgcgggtgaagtcggtctcgcgggccccttcttcttcgatgcggcggtagcggtcctccatgagagaccacagccagtggatgagggcgacctggtcggggacggtagtggcgaccatctcgatgttgggccactcccgcaggcccaggtactcgatgcgtttagggtcgatgacgaagacgcgccagttgcggcgggcaccctcgacggcgtcgccgatcatggacaccgtttttccggtacgggtgcggccggccttgagctggtgggccatgacaccggagatgtcccagaaacaggtgttgccgtcctcgtcgacggcctgggggattttctcccagtctggggagtctgggcccggaagggccacgggtcggggcaccatcgagggcagggggtggcggcgggtgacggtgatggtgtcgtgttccaggtcgaagtcgctgcgccactggccgagcatcatcgccgaggtcaccgcggccaggcgcaattggatgttcgggctggacaaatgggcgccacgttggtggtgaatggtgaagccgtccaggttcccccgatcggttttccaggaatcgacggtgaccgccgacccatagatctgagtggctacttctttagcccgttccttgtctcggtccagatcggttttgtcagggtcaggggtcggggcgcggtattgcaggacgaaccggccggccgggatcgttgcggatgtcaccgtgaactctgccggcgaccaggcagccgcggccgcctgggtgagggccattggcatggtctcgacggcagcctcctcgggggggatggtgagggtcaggcgtcgcggatgggtcttcttgcgattccatgtgactttctgcctcaccggcaccttcgccgccgactgaatggctaggcgagctgattcggcagtttcggtacgccggccagcgcgtagcgcccgtcgtgcgtgaaggctgcccaccacagcacagcccatacacggcagccaccagcgcggatcagcggctgctgcatagcccccggtagctagtaccgcacctgaccagccggccgcgatacttttccacgccggtttcgcgccaccaggaccagcgttatggacggtctgcttcgaggctgcggagggacgagacagcggagtgctggtcatgccgcggcctccttgtggcaggtcatttcacaggcatgtcggccagcgatgatgccgtggcgcaccgccccggtagccgcatagaccgcgcacaactcaaacacggggcacccatcgcaggccgccgggtccatgctttctttgtcccacgatggtgggtcatcggtgcacggcacggccaggccgtcctgctgggcggtggcgatagcggtgaataagcgcagctgggcgcgaacttggtctggggtcaggttgacagtgcgggctacacgcatggggttccttcctcttcaccagtgaaggttccttagccccgagcgatgtgcggagagatttcagtgttttatcgaggtgaccagccatccggtctgcgctgcgggttcaggtaccagggtcagatgcaccacggtgtggtcggctaggggcacggcgaccaggggcccgtcggcgctcgccccggtgagggtgggagttccggccacggtggtggcgggaatctggttgggtttcgcggccatcagggagcccatgagggtcggggcggcgatctggacgagggcgactttgcgggcggcgggatcgcgggtcaaccagccgcgggtgaaggtgagcgcagccgacgtgatatcggggctcagcggggctggtgtggcggcggggtgggccgttgaggagggccatacgcgcggtagcgctggcgacatcgagcgggtcggagtggggtcaggtgtggggcttagggtccgatgtggcgatggggctaccgccccggtggtgggagacgagactggttgggggtggtgttgagggcgtgggatcagggtgaaggcagccaaactggccgggatgaggatgacggccgcgccgacacttcggagcgaggtcatgtgacgatccttcggtagctcgacgggttgccgtagatcttttccacgttgatgccactatgtgggttgtcggcgctgaccatttggcctccaccgatgtagacggccacgtggtgggcaggggtcccccaaaagatgaggtcgccgactttgagctggtcgtgggccacggcagtgccgactttctgctggtcggcggcggttcggggaaggctgatgccgatacgccggtacagcgccgaggtcaggcctgagcagtcgtagccgccatcagctttgccgttaccaccccacacgtaggcgtaggagttgttgtcggcgatcgatttggcccatgccacggcttcggccaggttcttcgacacaccggtctcgttagcggccccgatggcacagttgtttgacaggtgccctgtagtagtggatcccactatttgtttggccatggtttcccatttggcgtaggcatcgggcagggctgagccttgcactgcctgagctgcctgcgtcagcggcatcttctgccagtcagcgatgtcgactaaaccgggaatgtggaatccagggccgccggccgatccggggccagcgtaggtgatggtgtggcctttcaagaacgcctcggtggcgtaggcatcattgttgacctgatccagagtcccgtaccagcccggcaggatgcgctgctgaaaggggccggcgtcaccgtcaccgttagccttcgctgaggtagggtcggccccaagatctgattcttgtttggcggtcatgatagcgatgaccgctgcctgggtaggcagtttgtcacgctggaccacagtgacgatggtggtcacgagctgcttctgcctggccgtgaggcctccggcacccacagtgcctccggtgacggtacccacgcaagcatccccgccgacactgccaccgccgccgccagagttgtcgtcgagggccccagagcctactgacagcagcggcacaatgatcacggtcgctggcaagaccgccaggcccgccagcatcagcactgctgcactcaccacggcgatcacgtgagatgctttcaacgctgcccacctctcgctggtttgagggggcgacgcctgctggtacgcacaggcttggttgatccagtccgccgttgattggcaggcctgggtttgatcggcttgctgggacccggtttgggctccggagtcttaggctccggcttcacatgcctaggcacttcggctgcggtgggaggagtcagcacgtggcgtaccggcttggtgaccttctgggcacccgaaacaaccggcttagacaccaccttggcacctttgaccaccggtgcggctgccttcgcgccggccttcttgactgcacgatgcgctttgatagccccggcctcggcccggccaaccctactagcagtagcatcgagggctctgtggcccgtcgttgccctcaccggtgcatccttgccctggcgggtctgcttcgcgatcgccgacatgccgcctcgcaatgccgaaacatgattgtgggcgtgggcgatcgccgacatgccggccgtcgcgatttttgactggccctgcggggcccctgccccagcacgaatctgccggtaagccgccgacgtgccacgagcacccgccgccattcgcgccaccttcgcagccctagtcactcccgtcgacacgccacccgtggctaccgcagcagcacccgagaccacagtcgaggccatccgccttcgacccgatccggtgagcttgcgaccaccactgcgcaccatccggcgagcaccccgcccagcccactggccgatcaccgagcccctttcggaacgcttgctgcgcatccaatcgttgatcttgtccctcagccccttctcgcccttgtgacgacgccacatggacatcaagaacccgataatccccacgagctcgagcatgttgacaaccatgaccttgatggcgacatcaccgtcagaggcgaaaaccgacttgatgatgagcatgaccacacccaacatcaccatcgacccgacaatgccgatcatcgagtacaagatcgaacacagatcccggatgagcggatctgtgcggccagggatagcccgcaacacgttgagcatcgacataaacgccgaccacaccaacttgcacacgtagaaccagcacatgcccgcgaacaccagcaggaccacagccaaacccgccaccgtcgacgagtaaaagaagaaacccaccaaccacgaaccatccgcaatatcgccggcgtaatccgacaacccctcatcacagtcaccaaggtcgtcgcgagcatccgagacgtcatcgtaagggccacccttgagcacctcgatgtacttgtcgtggcacttcgcatcaataatccggccatagttgagctgctgatgaaccggcgccacgaacgagtccacaatgatcgccgacagcttcggatccttcgagtctcccgtcgaggtcatgtcatcaggaatctcgacctcaccagcggtcgccgtcgcaggatcaaccgaactagtaatcatccgagacagcgccacaccgaactgctgggtgcgagccaacggagtagccaacgtcgtcgtatcgcctgcgaacttcgccaccggggccgccaagaaacccaacgccagcgccgcagcaatcgccgcacgcgcacccgtagcccacgccccagccgtacgtcccctcatcatcttgacgaccacgcccacaccggcgcacgtcgtcagcaacgtcaacaccgttccaccccagctgtccgctcccagcggggccaaaaccttgtcgtggatgtcgttctgcaaccccaccagcgggccggtaatccacccgacccagctcatcgccacggtccagtccaacaaccggcacaacagggcaacgaccatcaggtacgtgttccaacacatgccaataatggaggcccacatactcttcagcggggccgtaacgccaccatcgtccatcgacatctggtactgaaacaagtgaataccgttggagtcagtcacattgaaaccgtcacccatccagcccagcccaggacccgacgccatggcaggcacactgctcagcgccaccaccagaaccagcgtggtgacgatgatacgaaatcgccgctccccggccccggggcggcgtggatgacggctcacgctgtctcccggtcgtgctcgggcgggttggagctggcggcttcgcggtggggaccgtaggcaggtctcagtagtcgaatttcaccgacgttgccgtgttggtcggcgtacaggccacaaccggggcctccggggttgagggcaatcttgaccaggtcagcgaactcttcaggggacgttttagggtccacgcccaggaactcgacacctttctgggcgaggttgatgttgtcgcacagcaacacgatgcgatgctgaatgaggttgcggacggtctcgttggggtaatcggcctcggggtcgtgggagccggtgataagccaggcgttggctcggcgggattcgcgcacgtactcgtcaatggcgtgggaggcttccggcgaggacgacatatggtggaactcgtcaacgatgaaagcggcgtcgcgggcccggtcgctgaagcacaccaggcgagccagacgggcaataagcgcgtagagggctcggccaaacaccttgtgcgggggcagctgccgaaacaaatgttctgacagcatctcctcggcgttaggaagagcgatgccacaagtgccaatgatgaggatgtcggcactcaggtcggcgggaggaaggtccgggtcaaagatggccgaagctagggaggccgagttctcgatgtcagcgaacacggcaatcctgtcagcgatcgcggtggcctcgggaaggtcgcactcctcggccaggtggcgggccaaacgcccacacgaggtgatctggtggtcacgcatgtaggccggtttgaggaccttggccagcgtggtcccggccacaccgatggtctccaagttaagcaaggtcagcaagaacgactgggcgacctgcccggccatctccgggggaaggatgcgcagcgggtccagcgacagcttggggtgggccgtgtcgacgatctggcgtctaaccccgtcgatagagttgacaaaggttacccactcccgctcatcggagttgtcggtggcaataatgcgcccgccccgggccgcgatggctgcgcacagccgcttctcggccatcgtcttgcccgcgcccatcttgccgatgaacgccaccgtgttgcctttctgatcctgagtgtcggcatgcaaatcgaggtaggccagcgactgcaacggggagcctgtgaccacagccaacgggatgccggtggtacggcccaaccggtactcaaccaccgggatagatgcggcgaacgcggaggcgtgagtcagctgacggtaggcgttaagcgaggaggagaaccggccaccgggccgggcagcccacagcaagtcctcctgacggcccacgggacgcacccacgtgaagtcaccgaacaccggatcattgacgaacgctcctgccagctcctcggtggtctcaaagtcaggagacgagacagtgacggtgataagagcctggatctcgacctcacgctcatcggcggccagctcggcgttgtagtcgacgagcacctgagcggaatgctcgatagacatgagggtcgaagcctgggtcatctcaccgccctcaacattgtcgagctgatcgacggtttggcggatggcccgctgatttttctgcatcgcagcgtgacgggtccgggccactccccggatcgccacgtcgaccggcacgccagtgtcgtcgatacggcccaggaactcgtaggcaggccacgtcatcgtgcggggcaccttacccagcacgatatgggactggtagacggtctcgccggtgtcggcaccgattttgaggacgcgacgattccacgcctgagccgtccgggacatgtgggagactcgcttgtcatcctcgctggccagcaggtcggaggtcgcggcctcatcgatgaccaactcccccagcgcggcacgtccaacctcatccatgagggcgattccctcgccaggggcatcatcacgcaaccgggtcgggtggcctgacaggtgctgccgaagccagatctgttcatcaacggtgaccgggcggggttggaacgctgccggcagtttcgcaccgaattccttagcctgacggagggcccactcccgtgcgacacggccaggagcggtggtcatgagtccggcggcttcggtgattttgttgagggcggcggtccaggcggtgtgggtgcgtattttctggtcttggttgagtttgatcgataggaaccacacgcgccggcctagggatgcggtttcaggctggtcgagggtggcgtcgatttcgtcggcccacacggggtgttcgctcaggtcgaggccggcggccatggcgtcgacgatttctgtggggtcggtccaggtgagggccccgttgaggcagaactcgtggcgggcgaggtggcggaataggtcgcggtgagctgcggcgacggtgagggaggcgttctcggtgacgggtcgctggaggggagtaagtcgccaagtggcccagatgtcgccggtggaggtccagacgaggttgtcgaagaggaaccgttcggggatggacatcatgactccttttcggcggcggcgaggaaggcttccaggccgctgcggcgtacagcgttcccggtagggtgcaggggttttctgggggtgggttcagatttcgaatgtgggaagagtttgtggatggtatcggtgtcctcggcgagggcttggtcgagcaggcaggtggccggggtgtcggtcatctcgtccagctcgtcgatcatctcgtcgaggaggttgggggtggtggatgcggcccacacaggtgggatagccggtgcgggtcgaggcggtgtggggaggcggagtttggtttggccccagaggggtgtgtgggtcatgccggcgggagtggtggcggcgtgagtggtcacacgccaccagcccgacagccatgccagaggtgaccaggtccagtcgatgcgaccaacaacgaactgggcgagccatccggcagccagcgcgaaaatgaaaccgcggatggtcatgcccccgtcgataattttgaagcccatcatcgcggcaggaactacgccgccgacagcgagcacctgatagatcgtgtagggcccgccaggaatccttcgacctgaggaatccttgccgataatgcggggctgctggcgggcctcggtgtgccactgaatatccacgatcagctcttgcccaatccttgcatcatctgtccgaagaattggatcgcgttaccttcgataagccagtgcgccataccacacacaaacagcatggagacgatcttggccaggctcataccgtgtttgaagatgttgaacgcggcaatgcccacgactacgaccatggcgacggctcgcaccgcggactgaccttcacctgccttgatcgtcgtccattcgaagaggttctgcgattccagtggcagcaggaggaattgatcgagcatgagaggttttcctttcaggaagccgaccgggatggtcccggtactgacgggctggacggcacgggtgtgccggccaggggcagaaggcgtgacggctggtcgagggcggcaacctcccagcggcctgcacgactgacaagagtcaggccgtactggctagtccgggtagtggattcgtcaccggtgggctggcatgtcacggtcaccgtgacggtaatcttctgccgatctgagggggtggggacctcgtcaggccccaccacatgagtggttttcaccgatacacacggggctgggtcaaccgcggtgaaagcggtccccgggctactccatctcgacaggtcagtattcccggtcagcatggcggccaagaaacccgaagaggtctgggcagccgggtcagcaggacgaatctccgaggagtccacgtcgggggctgaggccggtgcaggcatggggatctgcccaggtagacgcaaggcgatggccttgccgccggcatcgacgtggaccggaaccgaccaggcctgtccgctcccggattggccgcccatggtgaccacggtgacctgccacaggctcggatcagacggggagacggtagcgtcataggcggtgacggtggtgggcgctggaccaggtttgcggggcatgcgcgcatcggtgatcttggccgccaccaggtgttccagattgtccaagtgcccggagtcagaggtcagcagaagagtagtcacctcgaccgcggtggctgaggcgatctgagctgtgcggcggtcgtgatgggtggtgtcagtgctgacagctgtggtgggagcggatgccggggccgccgaacggaccagggcaacggggccgcatgcgactccgcacagcacgagggcaaggaagcctttggtggccatcgatccggtgtggggccagggacccacgttttcctgtgcctgttttttcttggccgaccaacggcgggacttagggttagcggatgcaccttctggggtgcatgctcgtctcaatcgcatcggtcacctccttcactggatgaagggaccaaggaggtgaccgatgtgcggtcgaacccgaaaaagttcaaacttttttctgggtctgcctcaagtacgacagaaggcctgcatcatcacggcgttgtggtagcagatcttgcgtcagcgcaaatgcatgggcctcgtaggagtagctcttaggtaggtcccggtggttgcggccagggcgagggtgtcgggtatgtgtagcgctagtcccgggttcgtggtgtgagggcttttgggtgctgacatgcactacccattgctagacgctgtgctgtggcatggctggacgtctagcagacgggttgacatcacctttaggctggcagcgcccgaggccgcaggccagaggaagcggacagcctaacgattgacgtccccctctcctttccccaacctcctggagtcgatgccccggagatagatcgatgtctatgcatcggtgcatcgatatacctatgtatctgtctgtggtttttagaggccactcccgtcgccccgggccgctcagcgataccgcaaggctgtgtgggatcag

SEQ ID NO: 207 - DNA, 12036 bp, Propionibacterium acnes
  source 1..12036: mol_type = genomic DNA
ccccaatgcccccacaacgatcagcacaccaacagcgatcatcaggtgggcagcactaactgatcccaacgaaccaagatcaaacaagccctgcccgggagcgtcgagcagtccgtgggcgcgaagccatgctccgagattgccaatgatcttggggatcatcttgttcagtagggctatccctccgatgccgacaacgaggaagacgaggatttcttcgcctgcgttgtttcttcctgtgtttgcggtcatgctgccttctcggggtggatggccagccagctgatgaggttgtcggtgatctgccctgagatttggatcagttcgacttgcccggcctgccatgcccgcgatgtgccggccagcaatgatgctgggacccctactgcgcggccacgggatgcaacctcagccaaggcggcgcgtaactcctcgacggtgctttcgatgtaccaactgccgtcagtactagtctcagcggcatcggtggtagcgataagagcatcggtgaggtcgtcgacggcgcggtccagatcagcgatgtccggtagggctacagcagtcatggtgtgtcttccttctagggtgccttcactggtgaagggtccctagccccggccgatgtgcggtgctgtgggaaaaatgcttcccattggtccgtcttagttaggaaacttggcctaagtgctgtcgagggtcgcgtgttcgtgaccggttcgaagacactgccgctttgccttcttgtcagtggcgtttccgagatggggtcagtgggcgatggctaggccgatgagggcgccgctgcacaggctgggtgcccaggggaggaatcgggtggtgtggtgtcggaaccggtcgattagggcatatagggcgatcagggtgaggccggctatgaccgtggcgtggatcgtgtcgatgccggttgctgcggccggggctgcccacagtggtgtgatgcgcacgtcggagaagccgaagccgcctcgggagatgagccaggcgatcatccacgctgcgaagatgatggcggtagcgatgacagcacgtatcgccgcagtatggtccgagagggcggtaacgactacagccccgatccatccggcccatccggtccacgctaggactgccggtatccatgtggtgatggcgtcaatgacggcaacccatgccccgatggtggctagcagggcccacgtcggccacgtgggtgctggggcccatgctgtggcggcgatcatggtgaccgcagccgcggcacagaccgcgatcaagcttcggagactgtaggtgtcgcggtaggcgatcttgtcgggattggcggtggccggttcgggcaggatgcgagtgagggagggccatcctgcggtcgcaatagccgcgacggcgaccacccacacgatctgttgcatgggtctcatcatggcccatcatcgatgagtatgggtggccgacatggggtcactcgtagaggggatcgaggggtgtgcgggcgagcatggcttcctgtgtgccgagcatgagggtgccagagtcgtcgccggccgattcccagtcgacgatgatctgcccgctgtcgacgctggattcggtgatggtcacccattctccgtcgatattgatgagcaccccagcggccagctctgtggcagcaaccgggtgaggtgggttgtagaagcggtcgatgtcgcaggcagggtcgtcgggttcctcgactaccggaggtggggtagggctgagctgttcggtgtcgtcggccaggtcggctcccaggatgcgctcccattcggggctggttttcttgcccgctgaggccatcgtctcgtcgatctgttcgtcagtgggccacacaaatttctttttggtccaggtcgtggtgtcgggtcgcagctgatccagcagttccaggtcttgcggggagtgggccttgcgggggtcgggggtgtagaagaattggacttccttgggggctgattcgccggataggtaggtgcctcggccgcgtttgccgaacgggatgcccacgccgacgtgttcggagccgaacatcatgcgggctccgtcagcggacaggggtccggtggcggcacgcccggagaagttgtctcggatttcgccgcccaggaactcggcgtcggggcgttgggtccccagatcgacgtggatacggcaggcggctgccatgcgcagcagggagccgatccagccgaaaacggggcattctccgggcatcccagagaccttgatcgttgaccaccagtttttcgcgttgccgtagaactggcggtactcgtcgatgaggaccagcacgcgggtgaagtcggtctcgcgggccccttcttcttcgatgcggcggtagcggtcctccatgagagaccacagccagtggatgagggcgacctggtcggggacggtagtggcgaccatctcgatgttgggccactcccgcaggcccaggtactcgatgcgtttagggtcgatgacgaagacgcgccagttgcggcgggcaccctcgacggcgtcgccgatcatggacaccgtttttccggtacgggtgcggccggccttgagctggtgggccatgacaccggagatgtcccagaaacaggtgttgccgtcctcgtcgacggcctgggggattttctcccagtctggggagtctgggcccggaagggccacgggtcggggcaccatcgagggcagggggtggcggcgggtgacggtgatggtgtcgtgttccaggtcgaagtcgctgcgccactggccgagcatcatcgccgaggtcaccgcggccaggcgcaattggatgttcgggctggacaaatgggcgccacgttggtggtgaatggtgaagccgtccaggttcccccgatcggttttccaggaatcgacggtgaccgccgacccatagatctgagtggctacttctttagcccgttccttgtctcggtccagatcggttttgtcagggtcaggggtcggggcgcggtattgcaggacgaaccggccggccgggatcgttgcggatgtcaccgtgaactctgccggcgaccaggcagccgcggccgcctgggtgagggccattggcatggtctcgacggcagcctcctcgggggggatggtgagggtcaggcgtcgcggatgcgtcttcttgcgattccatgtgactttctgcctcaccggcaccttcgccgccgactgaatggctaggcgagctgattcggcagtttcggtacgccggccagcgcgtagcgcccgtcgtgcgtgaaggctgcccaccacagcacagcccatacacggcagccaccagcgcggatcagcggctgctgcatagcccccggtagctagtaccgcacctgaccagccggccgcgatacttttccacgccggtttcgcgccaccaggaccagcgttatggacggtctgcttcgaggctgcggagggacgagacagcggagtgctggtcatgccgcggcctccttgtggcaggtcatttcacaggcatgccggccagcgatgatgccgtggcgcaccgccccggtagccgcatagaccgcgcacaactcaaacacggggcacccatcgcaggccgccgggttcatgctttctttgtcccacgatggtgggtcatcggtgcacggcacggccaggccatcctgttgagcggcgctgatagcggtgaataggcgcagctgggcgcgaacttggtctggggtcaggttgacggtgcgggctacacgcatggggttccttcctcttcaccagtgaaggttccctagacccggccgatgtgcggagggatttcagtgttttatcgaggtgaccagccagccggtctgcgctgcgggttcaggtaccagggtcagatgcagcatggtgtggtcggctaggggcacggcgaccaggggcccgtcggcgctcgccccggtgagggtgggagttccggccacggtggtggcgggaatctggttgggtttcgcggccatcagggagcccatgagggtcggggcggcgatctggacgagggcgactttgcgggcggcgggatcgcgggtcaaccagccgcgggtgaaggtgagcgcagccgacgtgatatcggggctcagcggggctggtgtggcggcggggtgggccgttgaggagggccatacgcgcggtagcgctggcgacatcgagcgggtcggagtggagtcaggtgtggggcttagggtccgatgtggcgatggggctaccgccccggtggtgggagacgagactggttgggggtggtgttgagggcgtgggatcagggtgaaggcagccaaactggccgggatgaggatgacggccgcgccgacacttcggagcgaggtcatgtgacgatccttcggtagctcgacgggttgccgtagatcttttccacgttgatgccactatgtgggttgtcggcgctaaccatttggcctccaccgatgtagacggccacgtggtgggcagggcttccccagaggatgaggtcgccgactttgagctggtcacgggccaccgcggtgccgactttctgctggtcggcggcggtgcggggaaggctaatgccgatacgccggtacagcgccgaggtcaggcctgagcagtcgtagccgccatcggctttgccgttgccaccccacacgtaggcgtaggagttgttgtcagcgatcgatttggcccatgccacggcttcggccaggttcttcgacacaccggtctcgttagcggccccggtggcacagttgtttgacaggtgccctgtagtagtggatcccactatttgtttggccatggtttcccatttggcgtaggcatcgggcagggctgagccttgcactgcctgagctgcctgcgtcagcggcatcttctgccagtcagcgatgtcgactaaaccgggaatgtggaatccagggccgccggccgatccggggccagcgtaggtgatggtgtggcctttcaagaacgcctcggtggcgtaggcatcattgttgacctgatccagagtcccgtaccagcccggcaggatgcgctgctgaaaggggccggcgtcaccgtcaccgttagccttcgctgaggtagggtcggccccaagatctgattcttgtttggcggtcatgatagcgatgaccgctgcctgggtaggcagtttgtcacgctggaccacagtgacgatggtggtcacgagctgcttctgcctggccgtgaggcctccggcacccacagtgcctccggtgacggtacccacgcaagcatccccgccgacactgccaccgccgccgccagagttgtcgtcgagggccccagagcctactgacagcagcggcacaatgatcacggtcgctggcaagaccgccaggcccgccagcatcagcactgctgcactcaccacggcgatcacgtgagatgctttcaacgctgcccacctctcgctggtttgagggggcgacgcctgctggtacgcacaggcttggttggtccagtccgccgttggttggcaggcctgggtttgatcggcttgctgggacccggtttgggctccggagtcttaggctccggcttcacatgcctaggcacttcggctgcggtgggaggagtcagcacgtggcgtactggcttggtgaccttctgggcacccgaaacaaccggcttagacaccaccttggcacctttgaccaccggtgcggctgccttcgcgccggccttcttgactgcacgatgcgctttgatagccccggcctcggcccggccaaccctgctagcagtagcatcgagggctctgtggcccgtcgttgccctcaccggtgcatccttgccctggcgggtctgcttagcgatcgccgacatgccgcctcgcaatgccgaaacatgattgtgggcgtgggcgatcgccgacatgccggccgtcgcgatttttgactggccctgcggggcccctgccccagcacgaatctgctggtaagccgccgacgtgccacgagcacccgccgccattcgcgccaccttcgcagccctagtcactcccgtcgacacgccacccgtggctaccgcagcagcacccgagaccacagtcgaggccatccgccttcgacccaatccggtgagcttgcgaccaccgctgcgcaccatccggcgagcaccccgcccagccaactggccgatcaccgagcccctttcggaacgcttgctgcgcatccaatcgttgatcttgtccctcagccccttctcgcccttgtgacgacgccacatggatatcaagaacccgataatccccacgagctcgagcatgttgacaaccatgaccttgatggcgacatcaccgtcagaggcgaaaaccgacttgatgatgagcatgaccacacccaacatcaccatcgacccgacaatgccgatcatcgagtacaagatcgaacacagatcccggatgagcggatctgtgcggccagggatagcccgcaacacgttgagcatcgacatgaacgccgaccacaccaacttgcacacgtagaaccagcacatgcccgcgaacaccagcaggaccacagccaaacccgccaccgtcgacgagtaaaagaagaaacccaccaaccacgaaccatccgcaatatcgccggcgtaatccgacagcccctcatcacagtcaccaaggtcgtcgcgagcatccgagacgtcatcgtaagggccacccttgagcacctcgatgtacttgtcgtggcacttcgcatcaataatccggccatagttgagctgctgatgaaccggcgccacgaacgagtccacaatgatcgccgacagcttcggatccttcgagtctcccgtcgaggtcatgtcatcaggaatctcgacctcaccagcggtcgccgtcgcaggatcaaccgaactggtaatcatccgagacagcgccacaccgaactgctgggtgcgagccagcggagtagccaacgtcgtcgtatcgcctgcgaacttcgccaccggggccgccaagaaacccaacgccagcgccgcagcaatcgccgcacgcgcacccgtagcccacgcccctgccgtacgtcccctcatcatcttgacgaccacgcccacaccggcgcacgtcgtcagcaacgtcagcaccgttccaccccagctgtccgctcccagcggggccaaaaccttgtcgtggatgtcgttctgtaaccccaccagcgggccggtaatccacccgacccagctcatcgccacggtccagtccaacaaccggcacagcaacgcaatgaccatcaggtacgtgttccaacacatgccaataatggaggcccacacacccttcagcggggccgtaacgccaccatcgtccatcgacatctggtactgaaacaagtgaataccgttggagtcagtcacattgaaaccgtcacccatccagcccagccccgggcccgacgccatagcaggcacactgctcagcgccaccaccaaaaccagcgtggtgacgatgatacgaaatcgccgctccccggccccggggcggcgtggatgacggctcacgctgtctcctggtcgtgctcgggcgggttggagctggcggcttcgcggtggggagcgtaggcaggtctcagtagtcgaatttcaccgacgttgccgtgctggtcggcgtacaggccacaaccgggacctccggggttgagggcaatcttgaccaggtcagcgaactcttcaggggacgtcttgggatctacgcccaggaactcaacgcccttttgggcgaggttgatgttgtcgcacagcaacacgatgcgatgctgaatgaggttgcggacggtctcgttggggtaatcggcctcggggtcgtgggagccggtgataagccaggcattggctcggcgggattcgcgcacgtactcgtcaatggcgtgggaggcttccggcgaggacgacatgtgatgaaactcgtcaacaatgaaagcggcgtcgcgggcccggtcgctgaagcacaccaggcgagccagacgggcaataagcgcgtagagggctcggccaaacaccttgtgcgggggcagctgccgaaacaaatgttctgacagcatctcctcggcgttaggaagagcgatgccacaagtgccaatgatgaggatgtcggcactcaggtcggcgggaggaaggtccgggtcaaagatggccgaagctagggaggccgagttctcgatgtcagcgaacacggcaatcctgtcagcgatcgcggtggcctcgggaaggtcgcactcctcggccaggtggcgggccaaacgcccacacgaggtgatctggtggtcacgcatgtaggccggtttgaggaccttggccagcgtggtcccggccacaccgatggtctccaagttaagcaaggtcagcaagaacgactgggcgacctgcccggccatctccgggggaaggatgcgcagcgggtccagcgacagcttggggtgggccgtgtcgacgatctggcgtctaaccccgtcgatagagttgacaaaggttacccactcccgctcatcggagttgtcggtggcaataatgcgcccgccccgggccgcgatggctgcgcacagccgcttctcggccatcgtcttgcccgcgcccatcttgccgatgaacgccaccgtgttgcctttctgatcctgagtgtcggcatgcaaatcgaggtaggccagcgactgcaacggggagcctgtgaccacagccaacgggatgccggtggtacggcccaaccggtactcaaccaccgggatagatgcggcgaacgcggaggcgtgagtcagctgacggtaggcgttaagtgaggaggagaaccggccaccgggccgggcagcccacagcaagtcctcctgacggcccacgggacgcacccacgtgaagtcaccgaacaccggatcattgacgaacgctcctgccagctcctcggtggtctcaaagtcaggagacgagacagtgacggtgataagagcctggatctcgacctcacgctcatcggcggccagctcggcgttgtagtcgacgagcacctgagcggaatgctcgatagacatgagggtcgatgcctgggtcatctcaccgccctcgacgttgtcgagctggtcgacggtttggcggatggcccgctgatttttctgcatcgcagcgtgacgggtccgggccactccccggatcgccacgtcgaccggcacgccagtgtcgtcgatacggcccaggaactcgtaggcaggccacgtcatcgtgcggggcaccttacccagcacgatatgggactggtagacggtctcgccggtgtcggcaccgattttgaggacgcgacgattccacgcctgagccgtccgggacatgtgggagactcgcttgtcatcctcgctggccagcaggtcggaggtcgcggcctcatcgatgaccaactcccccagcgcggcacgtccaacctcatccatgagggcgattccctcgccaggggcatcatcacgcaaccgggtcgggtggcctgacaggtgctgccgaagccagatctgttcatcaacggtgaccgggcggggttggaacgctgccggcagtttcgcaccgaattccttagcctgacggagggcccactcccgtgcgacacggccaggagcggtggtcatgagtccggcggcttcggtgattttgttgagggcagcggtccaggcggtgtgggtgcgtattttctggtcttggttgagtttgatcgataggaaccacacgcgccggcctagggattcggtttcaggctggtcgagggtggcgtcgatttcgtcggcccacacggggtgttcgctcaggtcgaggccggcggccatggcgtcgacgatttctgtggggtcggtccaggtgagggctccgttgaggcagaactcgtggcgggcgaggtggcggaataggtcgcggtgagctgcggcgacggtgagggaggcgttctcggtgacgggtcgctggaggggagtgagtcgccaagtggcccagatgtcgccggtggaggtccagacgaggttgtcgaagaggaaccgttcggggatggacatcatgactccttttcggcggcggcgaggaaggcttccaggccgctgcggcgtacagcgttcccggtagggtgcaggggttttctgggggtgggttcaggtttcgggtctaggaggggtttgggctcgtaggtggtgtcgatgtcttcggcgagggcttggtcgagcaggcaggtggccggggtgtcggtagtctcgtccagctcgtcgatcatctcgtcgaggaggttgggggtggtggatgcggcccacacaggtgggatagccggtgcgggtcgaggcggtgtggggaggcggagtttggtttggccccagaggggtgtgtgggtcatgccggcgggagtggtggcggcgtgagtggtcacgcgccaccagcccgccagccatgccagaggtgaccaggtccagtcgatgcggccgatgatgaactgggcgagccatccggcagccagcgcgaaaatgaaaccgcggatggtcatgcccccgtcgataattttgaagcccatcatcgcggcaggaactacgccgccgacagcgagcacctgatagatcgtgtagggcccgccaggaatccttcgacctgaggaatccttaccgataatgcggggctgctggcgggcctcggtgtgccactgaatatccacgatcagctcttgcccaatccttgcatcatctgtccgaagaattggatcgcgttaccttcgataagccagtgcgccataccacacacaaacagcatggagacgatcttggccaggctcataccgtgtttgaagatgttgaacgcggcaatgcccacgactacgaccatggcgacggctcgcaccgcggactgaccttcacctgccttgatcgtcgtccattcgaagaggttctgcgattccagtggcagcaggaggaattgatcgagcatgagaggttttcctttcaggaagccgaccgggatggtcccggtactgacgggctggacggcacgggtgtgccgtccggaggcagaaggcgtgacggctggtcgagggaggcaacctcccagcggcctgcacgactgacaagagtcaggccgtactggctggtccgggtggtggattcgtcgccggtgggctggcatgtcacggtcgcggtgacagcgatcttctgccggtctgagggggtggggatctcgtcaggccccaccacatgagtggttttcactgatacgcatggggctgggtcaaccgcggtgaaagcggtccctgggctactccatctcgacaggtcgtcgctgccactcagcatggcggttaggaagcctgaagaggcttgggcggccgggtcggcggtgcgaagctccgaggtgtctagggtgggggctgaggccggtgcaggcatggggatctgtccaggtagacgcaaggcgatggccttgccgttggaatcgacgtggaccgggactgaccaggcctgtccggtcccggattggccgcccatggtgatcactgtgacctgccacaggctcggatcagacggggagacggtagcgtcataggcggtgacggtggtgggcgctggaccaggtttgcggggcatgcgcgcatcggtgatcttggccgccaccaggtgctccagattgtccaagtgcccggagtcagaggtcagcagaagagtagtcacctcgaccgcggtggctgaggcgatctgagctgtgcggcggtcgtgatgggtggtgtcagtgctgacagctgtggtgggagcggatgccggggccgccgaacggaccagggcaacggggccgcatgcgactccgcacaacacgagggcaaggaagcctttggtggccatcgatccggtgtggggccagggacccacgttttcctgtgcctgttttttcttggccgaccaacggcggggcttgggctcagcggatgcactttctgagttacgtactcgtcccaatcgcatcggtcacctccttcactggatgaagggaccaaggaggtgaccgatgtgcggtcga

SEQ ID NO: 208 - DNA, 9744 bp, Propionibacterium acnes
  source 1..9744: mol_type = genomic DNA
gctgacatgcaccgcccattgctagacgctgtgctgtggcatggctggacgtctagcagacgggttgacatcacctttaggctggcagcgcccgaggccgcaggccagaggaagcggacagcctaacgattgacgtccccctctcctttccccaacctcctggagtcgatgacccggagatagatcgatgtctatgcatcggtgcatcgatatacctatgtatctgtctgtggtttttagaggccactcccgtcgccccgggccgctcagcgataccgcaaggctgtgtgggatcagctgcgccgctcccccgacatggcagacagcaccctgcggactgactgacactgtggcgccgcggaggtctcccgcggcgtccgctggggcgagtgcatgcctgtcagctcatcttttatcgtcatgtttccccttgtcagagcgggctttgcaaagtgacaacgttggggggcttgacgacaacgtcctcgacaaccccgaggcggtgatctgtgtcttgtcagatcaaccgcaacgggaaagaggcaccgctgatgttcgccaccacagctaccctcaacgatgaatgggaccagattcgcgccactgagatcgattggcatgactgccccgaactgatgcactgcgtcaccgccgaggatgtgctggccgtcatcccggccgcccccgacgccatcttgggctacctcattacccgagctcaggacggtgacgaattagccacccgcaccatcatccaagcgttcacaggcaagcttattttgatggccacggccaccaaggtgcgccgtactaatgacggcttcaatgatctgctggcggggttgtgggagacgatcatcacgtacccgttggatcgtcgccctgacaagatcgctgcgaacctcaccctcgacacgttgcaccgggttacccggttctggcgtgctgattcccccgatgaggaagacgctcacggtctggtgcccttccctgacactctcatcgccccagagcccgatgaggacgtcacagctagccaggccatcgccttggcggtggaccgcaactggattaccgaggacctagcccgcctcatgagccatatttactgtgacggtatgactggagctgatgcgggtcgtctgcatggctgcgctccagctacggtgcgatctcgatgccgtgatggtcgggccgtgttgcagcgcaacgccgagacgatcctggccgtctgctgatccctctcttgctcatgcctgccgccaccctacccctacctgctagaaacatagccatgtctccagcaacgcatctagcgtatcttctagcaattgatctagctatgtatatagctgatgatctagctatcatatagctgtgtctccagcccaaatgacagcccaatggcatgcttgccacaggaaggtgcgtcagcctcccgaaatactggaaggagctttagcgtgcaggacatgaccagtcctattgaccgatccccgttcgaccgcactattgcggtgtggaaccacaaaggcggcacgttcaagacgtccgtcgtggcgaacctgggatacctgttcgccgccggtggcaacaaggtgttgatggtcgacatggacccccaggccaatctcgacatcgacttcggtatacccgcaggagaacgtgaacggggcatgggattagccgaggcgctacgtgaggggactgtccttcccccaccacagcatctcagcgaaaacctccacctggtcagtggcggcgctgctctcaacgagttcaccgaccccgcatccttagcggccatcatcgaccgagtcaccaccgagcgctacgacctgctagctcaggcccttgccccgctggcctgggactatgacctcatcttcatcgactccgggcctgcccaaactctgctgtcccagaccatccttggagtagcccgctggctggtagtgcccacccgcaccgataacgcctcaatcactggcctcgtcgacgttcaagacgccatcgacggggttgcctcctgcaaccctgaccttcaactactcggcgttgtcctagccggcgtgggggcccgggccacccggatcgccgcagataaacgccacgccatcgacacagtgctgggggcaggaaccgttttcgatgcggtcatccactactccgagaaggtgtccgtgctcgcacgccagcagggcaagaccgtcgccgagctagccaacgagtaccacaacacccagcccgcctacacctacctagctaaaggccagaacatccccaacgtcgccaaggcagccgtcagcatcgaaactgattatctgaggctggccaccgagatcagcgaccgcatgttcaccagcgacgagcaggagcctgatcatgactgacgatccgactccatccgagcagaacaaccccaccagcgacgacatgcgcttggccgaagaatgggccaacagcggccgcacagtgggagccctgccgcgccgtcaacggcctcagcgacccacaccccgcaccaccagccaaccccctgtctcgtcccctgacacaccggctccgaaaaaagcccagaagacccccaccagccagcctggccgtcaacggatcaacgtcaccgtctacgttgtgcccgaactccatgagcggctgcgctcccgatcggcggcgacgggggtgacggtctcggatctggtggtgcatgcgttagcgttcgtcgccgatcatgcgggggaggcgatcgccgatgatctgcgcgtcgagacgggccccggcatgggggccggactgttcgatgtgaccccatcgcggccagtaggggtcgccaaaacccagctgggggtgcgaatgacccgccacaacaagaatggcttggaccagctgacccggacgagtggggcccgtgaccgcagccatcttgtgtctgtcgccgtgcgcgactatctcgactccaaccctgtaaagaaaggccgacatgtccgctgatgaaactcctgccgcccggggtgggcgacgctttgatacgaccgtcaagcccaggcgccgtcccatgcttatcgccgccggtatcgccatcgtgatagtcggcgcgctcctcatcactcagttgattcgctccgcccaaaccgagcatcgcgtgctggaagtccacgccgatgtggctcgcggcgaggtcatccgtgacaccgatctggtatcggtgactgtcggccaggtcgacaacgtatcaacggttcccgcagaccagctcgactcactggtcggcaaacgcgccacggcagatcttcgagccggatcactcttgcctgctggggctatcggcccggccgatgtcgttccagctccgggcaagtcgctggtcgggctgaagctagccgccggacagatccctatcggagaccttgctgccgggacgaagctgcgcctgatccagacgtcggcacccagcggctcatccaccaccactgatagcagcaccaataccgatggccagtcgtgggaggcaacaatggcgaccggcaccaaaaagaccgagcaggtcaccttgatcaacgccgaagtgaactcgcgtgatgccgcccggatcgcccaactgacgtcacagggccgtatcgccgtagtgaaggatccgatccgatgagcaccattgttttgaccagcgtctcgggagccccaggggtcaccacgacagcgatcgggctgggcagggtctggccacaatcgagcctggtcatcgaggatgacacccaccacgccatgctggcgggctacctgcgagcctcccagcacgccgaaccgaacctggccgcagtggcgaacctgacgtcgactccaaccaacgcccaaacggtgtgggaatctatcgccagacccctacccaccgatgacccagtcggcgggctgcgacgcaaaggcatcctcggcccgcccacgccgtggtctcgcgcaggcatcgacccccgatggggattcatgctggccctgtggcggcaactggaggaggctggcatcgacaccatcatcgatttgggtcgcctagccacaccactgacctcaacgccacacctgatcgccgcacccatcgtcgaggacgccgacatgatcttggtgatgatcgaggcgacactacgcgacatcgccggcgcccgcacgatggtggagggactcgctgagcagatgaacttggccggcgcctaccgacgtctcggactgcttgtccaccgtggcggccaggcccgcggcgtcgccgagttcaatgacaaggagatcacctcggcgttacgactcccggtcatcggggccattacccatgacccggccggagccgcccaactctccgacggggtcgggcagcggttcgacaagtcacgtctggcccgctcactatcaaaggtggcggccagcctcgtcgatgccataaacaagcgccacgctgatgacgaggaggatctgtgatggccagttttgctgataatccgttcgacaagctgcgctcccaggatgcggcaagagcttcggtagagcaggagcctgatgccggattagcgtcggagttgttttcggcgtcgtcggggtgggccagctctcagcaggtgtcccaagctcaaccggtgatgacccgttcggagaacgtggattggccggttgtcgcggagctagccagtacggccactgatgaggttgaggctgagatcagccggtggagttccactcatgatggggtggcgacgctagacattcgccaggccatcgcggagcctgctattgcctcggcggtgtctacgtatgctgaccgacgccagatcgatgtaggggagacctggcctgatctggtacgccagcgataccgcaaggctgtgtgggatcagctgttcgggatggggcggttgcagccgctgttcgaaatcagcgacgccgaaaacatcatcgtggtgggtaaccatgaggtggttgtcgaccacaacgatggttcccggtcaacgctgccgccggtggccgactcggatgccgagctggaatcccagatcgcccggatggcgaggaatgcgaccccgcggcgagccttcgacgccgatcacaccgatgtgacgatcatgcaccaacagaagttccgtatccacgcgatctcagcggaagtgtcattgcaaccgtcggtggtcatccgccaacatttgctcacccaaatcagtctgggggatctgtcacatcgcggaatgatgccggtggaagtggcccggttcctcgatgaggcggtacaagctggcaagtccatcgtggtcgccggtgagcagggtgcaggcaagacgacgtttttacgagcgttgatccacgccattccgatgcgggagcggttcgccacgctggagaccgatcaggagttgttcgctcatctgatgcctggccgggaaaacacgctggtgctgttcgcccgtgatggtaacggcgaggtggatccggcgactggcacccagcacggcgctatcgagatcgcccagctgattcctcctagcctgcgccaggcgttaactagggtcattgtcggtgaggtgcgcggcaatgaggcctcggccatgttccaggccatgcagtcgggtacaggcaccatgagcagtatccactccccgcgagcctctgaggtgccgtcccggctagcccaaatgatttcgatgggcccggtctacgatctggatcaggccatgctgcagatcggtcattcgatcgactacatcgtctttgttcgtaagcgtgacctgcctgatgggagccggctgcgatttgttgagcagatccgttcagtctcgcctggtgattcgacaactcccagtcttggcgaggtgtacacggccgatgcgtggaccggtcagccgttgaccccgctcatgcctggttcggccgccgacgagctgtctcacttcgcccgagacctggattactgcgaggcccactcatgaacactcccgcactaaccagcgccctcatcatggccgggctagggctgatcctggccatcgacgggctggtcccggcgccgcctcgacctggggccccgctgagcccggcccagaggtgggccaggctcacccaccgtcccacaggagcggccgggcgccgccgggatttgcgttgggggttggctgttctcgtcggcgtcgtgctgtttgtgctcaccgggtgggtggctgcgctggcgttgggccccatcattgtgttgttggcccccaccctgctgggggcggccccaccgaccgatattccgctgatggaggcgttggatcggtgggtgcgtcaggtcgctgcggtgctgccacaggggcgagacatcatcacagcggtgcggatctcacggccgcgggccccgaagctgatcgccgggtcggtggatcaactggtgtcccggttggatggccgtatggagccgagggaggcgttccagcggatggccgacgagctggactcggctgaggctgacgcggtgctggcctcactagcgttggcggccactcacccgcggggagcctcgacaacgttgaaagctattgctggcaacatccaacagcggttgaaagtgctgcggcaggtggaggctgagcggtctaagccgcgtaactcggtgcgccagatcacactggtcacgatcgccatgttcggggggctgctcgtgatcggacggtcgtttctggccccgctggcgacccctcccggtcaggtgctggtggccgtggcggtggtcatgtatgtcatcgcactagtgcagatgtatcggatggcgcggccccgtcgacgcacccggatcatggttaggaggacccgatgaccattactgctttgtccctgctggtcggggccatcgtcactgtcggactgctggtcatcgtggcagcgttccgcccagccccaggccctgacctgtttgccgctctggaggtggtgtcgggtcgcacctcaagcgtcgccgagaacgtcgaccagacccggatcgggcggataggtcgcagcgtgacccgcacattccatgtgtcggtgtccccggccatgcgggccgcactgcgactccaaggcacgacccccgaagcgttctacggtcgacgcctgatctgcgcactgatcggggcgatcctgccgtggctgctcaacgcggtagccatcgcggtaggggcgaattccccgaacctactcatcccttcggcgctgtgtgtggcgttagctggcgctggatggatgctgccggcagcacggttgaaggctgcggccgggcccaccaacgatgactcgttcgaagcgctgctggtattcatcgatttggtcgtgctggaacggctcgccaacgaaacctccgtcgacgcgctcaccaatgcggcaaacatgtcggactcgccgctattcgtccagatccgtcaagtcctcaaccgtgcctccctggaaaacgtcgacccgtggaacgggctagaccggctagccgaggacatcaaactgcccgaactcaccgatgtggtctccatcgcccgcctccaaaacgaaggcgcctccctcgtcgacagtttccgggcccgagtcgccgagttgcgcgacgcctacctgctgcgcctgcaacaagaatccaccacgatcacccagcggcttggcctgtggacgatcctgcaagccggctcggtcatgctcatcttgctgggggcggccgccctcacactaatcacagccggataaaacgacaccgtgtcgagcccccatatgggccgcgaacctttcataatgatgcctgtaagcaccacaatattgatcacaacctaacaatgaaggagaaatcatgatgaccgatctcgacctggctaaaaaacagatcacctggctggcggcgcacctgcgttcccggatcgttgacgagcgtggcggtggtagctctaccgtggagacactgatttggattggtgtcatcgtggcgctggtgattggtgtgggcgtcggggtgacggcctatatcaggtcgaagatgcctcactgacgacgatgcgtagcaggttcacaactgatcagcgtggcggtggtagcgcgtcggtggggatgctcctgctgatgcctgcgatcatgctgctggcattcggtgggatcgaggtcgggatgtggtgtcacgcccatcagtcgaccatcgcggcagcccaaagcgccgcggaagctcagcgtgtcgtccatccggtcccggggtcggcacaggaggcagcctcgcagatcactagtcatggcggggtgcgtgatacccggatatcggtcagtgatgacggggccactgtcacggtgaccgtggtgggccgggccccatcgatgctggggctgcatcttcctgctgtgtcgtcgacagcgtcgatgcccaaggagcgcctgtcgtgaggcgaagtgagcgcggtggagcaagtctaagcgtcgaggtgctcatgtgggcgccgatcgcgctggtgatcatcgggtttgttgtgggtatcggccggatgtcgatggcccaggacgcggtgagtggcgcggcgggtgctgcggcccgtgcggcgtcgttggagcgtgatggacagtcggctcagtctgcggcgcagcaggcggcgtcggcgaacctgtcgtccggtgggctggcatgtgcgccgagtgtgagcgtggacacgtcagtgtttgcccgtcctgccgggcaggcgggcacggttcacgccacggtcacgtgtgtcacctcgctgggtcttgggttcgggtcccggacggtgcacgcaacggggtctgccccggtagacacctatcgggaaaggagaggctgagatggcccgtgatgagcgtggtggcggctcggtgtcggtgtggatgctgctcatggtgccggtgattctggtcatggccggcctggtttttgacgggtcccgtcagatatcggcaacccaggcggcccaggacgcggcggttgcggcatcccgcgccggaactgatgcggcagcgacaccgcagcttgctggccacgacggggcggccgtagcagtccaagcggcccgccaggcactatctgctgccggggtggacgggtcggtgcaggaggacgggtcgaccatcacggtgaccacgtctcaaagtcggccgacagtgttcctgtcagcgatcggaatcagccaggtaagggggcatgggcaggcccatgctcagcttgtgggaccgggagaacgcccatgacagtgatacgtcgtatcggtgccctggtggcactgctggtggtgatagccggcttaccggccgggctcgtggccgcaggcgccccgctagtaccctcgggcctgtcatgggcccatgtgcggcatctgttggttaccccagacatgaccgggtcggtgctggtgtggctggtcagcctcatcggctggatcgggtgggcatggttcgccctggccgtcgcagccgaagcggtgacgatgctctcagggcagcggctgcactggcacatgcccggccctcgcctagtgcgccgagtggcagccggtcttctcattgccgcgttcgcggccgcaccggcagccacaagcacggctcacgccgccgaggccacccatgtggcggtcgccgcccaggctggaccggcacacgcggccggcacccaggacagccccgccaccacctctcaggccccggacgcctccaccactccgaaaatctggaagacctacacggtgcgggccaacgactacctgtggaagatcgccgagcactactacggtgacg

SEQ ID NO: 209 - DNA, 1127 bp, Propionibacterium acnes
  source 1..1127: mol_type = genomic DNA
accccaactcgcctcaccacacgtcgacctcgacaccgatcaagcgacccgtatcagcgacattgccgtaccgctgacccgcctggtcctctagccacgacaacgcatcccggaacatccgcacgtcttccaaagcgaaaccgcagtcgtagccgcccttgtcccccaaccgcacaatctggcgctcccggtggcctccctcgtcgacttcgatccatagtttcgcgtgcatccgctggccgcggccttctgacaggatctcggtgagcagatcggaggcttgtcctcgcgcatcctcgttgtcgcgagggaattggagtgtgtgggaggaacgacgatgggggaggttggtgacctcgtgacgcagcaggttgcgcttgtgcatctgccgttcgagacgctcgggctgacctgttgacggggttgagccgtggcgccgcttcctcggcggggtctcgatccgttgctcttccggcggttcggcgtcaggttgtggtgcgcgatctcccctaagacgggggggctcgccacctatatccgagggacgatgagacggccttccacgcttgctgcgcactttcgcagcccgccccttgcggtcacatcgacgcggcggcggagtgacgtcctcaccgcgcgctagctgcgtcaacgccgacaccaggttggtgcccggtttcagcccttttagcacgaaccgcaccaggcgggggtctcggccgattcgtcgggcaatctcggcttggctccacccttcggctaacagggtgcgcaacaagtcttgggctcggttatcacgctcagtcactggtcgcctcctcggggagtcctgcctgctcggcctgctctgatagagcagcccgttccgatccggtctggggcgcttccaaagggcccggcaagacacctttgacacgcagccgcccgtccttgccgtcatcgccgcccccctgggccacagggagcgcccaggggggcacgttgctggtgtagatggcgtcgccgtggatagccagcacggtgcgggagttcatgcgtagtgctcctcccttggttgtggcgttttttccggtggtggggtcggcgatgggtgtgttgagggtgcgtacgcgggacagggcccagat

SEQ ID NO: 210 - DNA, 718 bp, Propionibacterium acnes
  source 1..718: mol_type = genomic DNA
ccggggccctgctgctggtgtgggacgtcaccgttttgaccgggcccactctcggccaccgcgtgcgtcctctcagtaaggacgccgagctgactgcccggcgctggctcgaccaggtcgccgacaaccccggcttcctcgacacccttatcgaggccgcccgcatcaccgagggatggcatcacgcgacgcctccgcacattcaggccccttaccggacccttcatcagtgaacggaggtacaacgacatgaccagcgacattgacattgaccggacccacaaacccgacgaccgcgccgaggctcctctttaccgagcctgggccaggagactcgtgcacgtctccgggatgccctggcgtatcgtcgccgccttggccggggtctcccccacctccatgcaccggcttctattcggccgcaacggtcgacccgtggaatggatcggcatcaatgatgctcgcgccctgatggatatcggcatcgatgatctcgcctcagcgtccaccgaccgtatcccggcccgcgaatcccgcgagctgttggtagccctgcacaccctcggctggaccgatgagcatctaagccgctggctgaccagttccgacctcgacctggccaccacccccaaggccctctacgtcacccggctatccgccgcccgcatccaggccacctacgacatgctcatcagccagcccgtccgccgctgcggcc

SEQ ID NO: 211 - DNA, 11765 bp, Propionibacterium acnes
  source 1..11765: mol_type = genomic DNA
ggtcagtgggcgatggccaggccgacgagggcgccgctgcacaggctgggtgcccagggaaggaatcgggcggtgtggtatcggaaccgatcgattagggcatatagggcgatcagggtaagcccggctatgacagtgacctggatcgtgtcgatgccggttgctgcggccggcgctgcccacagtggtgtgatacgcacgtcggagaagccgaagccgcctcgagagatgacccaggcgatcatccacgctgcgaagatgatggtggtagcgatgacagcacgtgttgccgcagtctggtccgagagggcggtaacgactacagccccgatccatccggcccatccggtccacgctagggctgccggtatccatgtggtgatggcgtcaatgacggcaacccatgccccgatggtggctagcagggcccacgtcggccatgtgggtgctggggcccatgctgtggcggtgatcatggtgagtgctgctgcggtacagaccgcgatcaagcttcgggggctgtaggtgtcgcggtaggcgatcttgtcgggattggcggtagctggttcgggcaggatgcgagtgagggcaggccatcctgcggccgcaatagccacgacggcgaccacccacacgatctgttgcatgggtctcatcatggcccatcatcgatgggtgtgggtggccgacatggggtcactcgtcgaggaggtcgaggggtgtgcgggcaagcatggcttcctgtgtgccgagcatgagggtgccagagtcgtcgccggccgattcccagtcgacgatgacctggtcgccgtcaacgctggattcggcgatggtcacccattgcccgtccatgtcgatgagcatcccggcggccagctctgtggcggcaaccgggcggggtgggctgtagaggaggtcgatgtcgcgggcaaggtcgtcgggttcttcggttacctcgggtggggtcgatctggctgtctcggtgtcgtcggccaggtcggctcccaggatgcgttcccattcggggctggttttcttgcccgctgaggccatcgtctcgtcgatctgttcgtcagtgggccacacaaatttctttttggtccaggtcgtggtgtcgggtcgcagctgatccagcagttccaggtcttgcggggagtgggccttgcgggggtcgggggtgtagaagaattggacttccttgggggctgattcgccggataggtaggtgcctcggccgcgtttgccgaacgggatgcccacgccgacgtgttcggagccgaacatcatgcgggctccgtcagcggacaggggtccggtggcggcacgcccggagaagttgtctcggatttcgccgcccaggaactcggcgtcggggcgttgggtccccagatcgacgtggatacggcaggcggctgccatgcgcagcagggagccgatccagccgaaaacggggcattctccgggcatcccagagaccttgatcgttgaccaccagtttttcgcgttgccgtagaactggcggtactcgtcgatgaggaccagcacgcgggtgaagtcggtctcgcgggccccttcttcttcgatgcggcggtagcggtcctccatgagagaccacagccagtggatgagggcgacctggtcggggacggtagtggcgaccatctcgatgttgggccactcccgcaggcccaggtactcgatgcgtttagggtcgatgacgaagacgcgccagttgcggcgggcaccctcgacggcgtcgccgatcatggacaccgtttttccggtacgggtgcggccggccttgagctggtgcgccatgacaccggagatgtcccagaaacaggtgttgccgtcctcgtcgacggcctgggggattttctcccagtctggggagtctgggcccggaagggccacgggtcggggcaccatcgagggcagggggtggcggcgggtgacggtgatggtgtcgtgttccaggtcgaagtcgctgcgccactggccgagcatcatcgccgaggtcaccgcggccaggcgcaattggatgttcgggctggacaaatgggcgccacgttggtggtgaatggtgaagccgtccaggttcccccgatcggttttccaggaatcgacggtgaccgccgacccatagatctgagtggctacttctttagcccgttccttgtctcggtccagatcggttttgtcagggtcaggggtcggggcgcggtattgcaggacgaaccggccggccgggatcgttgcggatgtcaccgtgaactctgccggcgaccaggcagccgcggccgcctgggtgagggccattggcatggtctcgacggcagcctcctcgggggagatggtgagggtcaggcgtcgcggatgcgtcttcttgcgattccatgtgactttctgcctcaccggcaccttcgccgccgactgaatggctaggcgagctgattcggcagtttcggtacgccggccagcgcgtagcgcccgtcgtgcgtgaaggctgcccaccacagcacagcccatacacggcagccaccagcgcggatcagcggctgctgcatagctccccgtagctagtaccgcacctgaccagccggccgcgatacttttccacgccggtttcgcgccaccaggaccagcgttatggacggtctgcttcgaggctgcggagggacgagacagcggagtgctggtcatgccgcggcctccttgtggcaggtcatttcacaggcatgccggccagcgatgatgccgtggcgcaccgccccggtagccgcatagaccgcgcacaactcaaacacggggcacccatcgcaggccgccgggttcatgctttctttgtcccacgatggtgggtcatcggtgcacggcacggccaggccatcctgttgagcggcgctgatagcggtgaataggcgcagctgggcgcgaacttggtctggggtcaggttgacggtgcgggctacacgcatggggttccttcctcttcaccagtgaaggttccctagacccggccgatgtgcggagggatttcagtgttttatcgaggtgaccagccagccggtctgcgctgcgggttcaggtaccagggtcagatgcagcatggtgtggtcggctaggggcacggcgaccaggggcccgtcggcgctcgccccggtgagggtgggagttccggccacggtggtggcgggaatctggttgggtttcgcggccatcagggagcccatgagggtcggggcggcgatctggacgagggcgactttgcgggcggcgggatcgcgggtcaaccagccgcgggtgaaggtgagcgcagccgacgtgatatcggggctcagcggggctggtgtggcggcggggtgggccgttgaggagggccatacgcgcggtagcgctggcgacatcgagcgggtcggagtggggtcaggtgtggggcttagggtccgatgtggcgatggggctaccgccccggtggtgggagacgagactggttgggggtggtgttgagggcgtgggatcagggtgaaggcagccaaactggccgggatgaggatgacggccgcgccgacacttcggagcgaggtcatgtgacgatccttcggtagctcgacgggttgccgtagatcttttccacgttgatgccactatgtgggttgtcggcgctaaccatttggcctccaccgatgtagacggccacgtggtgggcagggcttccccagaggatgaggtcgccgactttgagctggtcacgggccacagcagtgccgactttctgctggtcggcggcggtgcggggaaggctaatgccgatacgccggtacagcgccgaggtcaggcctgagcagtcgtagccgccatcggctttgccgttgccaccccacacgtaggcgtaggagttgttgtcggcgatcgatttggcccatgccacggcttcggccaggttcttcgacacaccggtctcgttagcggccccggtggcacagttgtttgacaggtgccctgtagtagtggatcccactatttgtttggccatggtttcccatttggcgtaggcatcgggcagggctgagccttgcactgcctgagctgcctgcgtcagcggcatcttctgccagtcagcgatgtcgactaaaccgggaatgtggaatccagggccgccggccgatccggggccagcgtaggtgatggtgtggcctttcaagaacgcctcggtggcgtaggcatcattgttgacctgatccagggtcccgtaccagcccggcaggatgcgctgctgaaaggggccggcgtcaccgtcaccgttagccttcgctgaggtagggtcggccccaagatctgattcttgtttggcggtcatgatagcgatgaccgctgcctgggtaggcagtttgtcacgctggaccacagtgacgatggtggtcacgagctgcttctgcctggccgtgaggcctccggcacccacagtgcctccggtgacggtacccacgcaagcatccccgccgacactgccaccgccgccgccagagttgtcgtcgagggccccagagcctactgacagcagcggcacaatgatcacggtcgctggcaagaccgccaggcccgccagcatcagcactgctgcactcaccacggcgatcacgtgagatgctttcaacgctgcccacctctcgctggtttgagggggcgacgcctgctggtacgcacaggcttggttggtccagtccgccgttggttggcaggcctgggtttgatcggcttgctgggacccggtttgggctccggagtcttaggctccggcttcacatgcctaggcacttcggctgcggtgggaggagtcagcacgtggcgtactggcttggtgaccttctgggcacccgaaacaaccggcttagacaccaccttggcacctttgaccaccggtgcggctgccttcgcgccggccttcttgactgcacgatgcgctttgatagccccggcctcggcccggccaaccctgctagcagtagcatcgagggctctgtggcccgtcgttgccctcaccggtgcatccttgccctgacgggcctgcttcgcgatcatcgacataccgccccgcaacgccgaaacacggttgtgagcgtgggcgacggccgacataccagctgtcgtaattttcgactggccctgcggagctcctcccccggtacggatctgacgatatgacgccgaagcacgccgcgccgccgaggccattcgcgccatcttcgcagcccgggtcactcccaccgacgcgccaccggtgactaccgcagccgcagccgaaaccatccgccttcgacccaatccagtgagcttgcgaccaccgctgcgcaccatccggcgagcaccccgcccagcccactggccaatcgccgacgccccttcagagcgcttactacgcatccagtcgttgatcttggccctcagcccctcctcacccttgtgactacgccacagagacaccaagaatccgatgattcccacgatttccaacatgttgacgaccatgaccttgatgacaacgttgccatcagaggcgaagaccgacttgatgacgagcatgaccacgcccaacatcaccatcgacccaacaatgccgatcatcgagtacaagatcgaacacagatcccggataagcgggtctgtgcgaccaggaatagcccgcaacacgttgagcatcgacatgaacgccgaccacaccaacttgcacacgtagaaccagcacatgcccgcgaacaccagcaggattgctgccaaacccgccaccgtcgacgagtaaaagaagaaccccaccaaccaggaaccgtccgcaatatcgccggcgtaatccgacaacccctcgtcacaatcaccaaggtcgtcgcgagcatccgagacgtcatcgtaagggccacccttgagcacctcgatgtacttgtcgtggcacttcgcatcaataatccggccatagttgagctgctgatgaaccggcgccacgaacgagtccacaatgatcgccgacagcttcggagccttcgagtctcccgtcgaggtcatgtcatcaggaacctcaacctcaccagcggtcgccgtcccaggatcaaccgaactagtaatcatccgagacagcgccacaccgaactgctgggtgcgagccaacggagtagccaacgtcgtcgtatcacctgcaaaattcgccaccggggccgccaagaaacccaacgccagcgccgcagcaatcgccgcacgcgcacccgtagcccacgccccagccgtacgtcccctcatcatcttgacgaccacgcccacaccggcgcacgtcgtcagcaacgtcaacaccgttccaccccagctgtccgctcccagcggggccaaaaccttgtcgtggatgtcgttctgcaaccccaccagcggtccggtaatccacccgacccagctcatcgccacggtccagtccaacaaccggcacaacagggcaacgaccatcaggtacgtgttccaacacatgccaataatggaggcccacatagccttcagcggggccgtaacgccaccatcgtccatcgacatctggtactgaaacaagtgaataccgttggagtcagtcacattgaaaccgtcacccatccagcccagcccaggacccgacgccatggcaggcacactgctcagcgccaccaccagaaccagcgtggtgacgatgatacggaaccgccgctccccggccccggggcggcgtggatgacggctcacgctgtctcccggtcgtgctcgggcgggttggagctggcggcttcgcggtggggagcgtaggcaggtctcagtagtcgaatttcaccgacgttgccgtgttggtcggcgtacaggccacaaccggggcctccggggttgagggcaatcttgaccaggtcagcgaactcttcaggggacgttttagggtccacgcccaggaactcgacacctttctgggcgaggttgatgttgtcgcacagcaacacgatgcgatgctgaatgaggttgcggacggtctcgttggggtaatcggcctcggggtcgtgggagccggtgataagccaggcattggctcggcgggattcgcgcacgtactcgtcaatggcgtgggaggcttccggcgaggacgacatgtgatgaaactcgtcaacaatgaaagcggcgtcgcgggcccggtcgctgaagcacaccaggcgagccagacgggcaatgagcgcgtagagggctcggccaaacaccttgtgcgggggcagctgccgaaacaaatgttctgacagcatctcctcggcgttaggaagagcgatgccacaagtgccaatgatgaggatgtcggcactcaggtcggcgggaggaaggtccgggtcaaagatggccgaagctagggaggccgagttctcgatgtcagcgaacacggcaatcctgtcagcgatcgcggtggcctcgggaaggtcgcactcctcggccaggtggcgggccaaacgcccacacgaggtgatctggtggtcacgcatgtaggccggtttgaggaccttggccagcgtggtcccggccacaccgatggtctccaagttaagcaaggtcagcaagaacgactgggcgacctgcccggccatctccgggggaaggatgcgcagcgggtccagcgacagcttggggtgggccgtgtcgacgatctggcgtctaaccccgtcgatagagttgacaaaggttacccactcccgctcatcggagttgtcggtggcaataatgcgcccgccccgggccgcgatggctgcgcacagccgcttctcggccatcgtcttgcccgcgcccatcttgccgatgaacgccaccgtgttgcctttctgatcctgagtgtcggcatgcaaatcgaggtaggccagcgactgcaacggggagcctgtgaccacagccaacgggatgccggtggtacggcccaaccggtactcaaccaccgggatagatgcggcgaacgcggaggcgtgagtcagctgacggtaggcgttaagcgaggaggagaaccggccaccgggccgggcagcccacagcaagtcctcctgacggcccacgggacgcacccacgtgaagtcaccgaacaccggatcattgacgaacgctcctgccagctcctcggtggtctcaaagtcaggagacgagacagtgacggtgataagagcctggatctcgacctcacgctcatcggcggccagctcggcgttgtagtcgacgagcacctgagcggaatgctcgatagacatgagggtcgaagcctgggtcatctcaccgccctcgacgttgtcgagctgatcgaccgtttgacggatagcccgctgatttttctgcatcgcagcgtgacgggtccgggccactccccggatcgccacgtcgaccggcacgccagtgtcgtcgatacggcccaaaaactcgtaggcaggccacgtcatcgtgcggggcaccttacccagcacgatatgggactggtagacggtctcgccggtgtcggcaccgattttgaggacgcgacgattccacgcctgagccgtccgggacatgtgggagactcgcttgtcatcctcgctggccagcaggtcggaggtcgcggcctcatcgatgaccaactcccccagcgcggcacgtccaacctcatccatgagggcgattccctcgccaggggcatcatcacgcaaccgggtcgggtggcctgacaggtgctgccgaagccagatctgttcatcaacggtgaccgggcggggttggaacgctgccggcagtttcgcaccgaattccttagcctgacggagggcccactcccgtgcgacacggccaggagcggtggtcatgagtccggcggcttcggtgattttgttgagggcggcggtccaggcggtgtgggtgcgtattttctggtcttggttgagtttgatcgataggaaccacacgcgccggcctagggattcggtttcaggctggtcgagggtggcgtcgatttcgtcggcccacacggggtgttcgctcaggtcgaggccggcggccatggcgtcgacgatttctgtggggtcggtccaggtgagggctccgttgaggcagaactcgtggcgggcgagggggcggaataggtcgcggtgagctgcggcgacggtgagggaggcgttctcggtgacgggtcgctggaggggagtgagtcgccaggtggcccagatgtcgccggtggaggtccagacgaggttgtcgaagaggaaccgttcggggatggacatcatgactccttttcggcggcggcgaggaaggcttccaggccgctgcggcgtacagcgttcccggtagggtgcaggggttttctgggggtgggttcagatttcgaatgtgggaggggtttgtggatggtatcggtgtcctcggcgagggcttggtcgagcaggcaggtggccggggtgtcggtagtctcgtccagctcgtcgatcatctcgtcgaggaggttgggggtggtggatgcggcccacacaggtgggatagccggtgcgggtcgaggcggtgtggggaggcggagtttggtttggccccagaggggtgtgtgggtcatgccggcgggagtggtggcggcgtgagtggtcacacgccaccagcccgccagccatgccagaggtgaccaggtccagtcgatgcgaccaacaacgaactgggcgagccatccggcagccagcgcgaaaatgaaaccgcggatggtcatgcccccgtcgataattttgaagcccatcatcgcggcaggaactacgccgccgacagcgagcacctgatagatcgtgtagggcccgccaggaatccttcgacctgaggaatccttaccgataatgcggggctgctggcgggcctcggtgtgccactgaatatccacgatcagctctttcccaatccttgcatcatctgtccgaagaattggatcgcgttaccttcgataagccagtgcgccataccacacacaaacagcatggagacgatcttggccaggctcataccgtgtttgaagatgttgaacgcggcaatgcccacgactacgaccatggcgacggctcgcaccgcggactgaccttcacctgccttgatcgtcgtccattcgaagaggttctgcgattccagtggcagcaggaggaattgatcgagcatgagaggttttcctttcaggaagccgaccgggatggtcccggtactgacgggctggacggcacgggtgtgccggccaggggcagaaggcgtgacggctggtcgagggaggcaacctcccagcggcctgcacggctgacaagagtcaggccgtactggctggtccgggtagtggattcgtcgccggtgggctggcatgtcacggtcaccgtgacggtaatcttctgccggtctgagggggtggggacctcgtcaggtcccaccacatgagtggttttcactgatacgcatggggctgggtcaaccgcggtgaaagcggtccctgggctgctccatctcgacaggtcggtattcccggtcagcatggcggttaggaagcctgaagaggcttgggcggccgggtcggcggtgcgaagctccgaggtgtctagggtgggggctgaggccggtgcaggcatggggatctgtccaggtagacgcaaggcgatggccttgccgttggaatcgacgtggaccgggactgaccaggcctgtccgctcccggattggccgcccatggtgaccacggtgacctgccacaggctcggatcagacggggagacggtagcgtcataggcggtgacggtggtgggcgctggaccaggtttgcggggcatgcgcgcatcggtgatcttggccgccaccaggtgttccagattgtccaagtgcccggagtcagaggtcagcagaagagtagtcacctcgaccgcggtggctgaggcgatctgagctgtgcggcggtcgtgatgggtggtgtcagtgctgacagctgtggtgggagcggatgccggggccgccgaacggaccagggcaacggggccgcatgcgactccgcacagcacgagggcaaggaagcctttggtggccatcgatccggtgtggggccagggacccacgttttcctgtgcctgttttttcttggccgaccaacggcgggacttagggttagcggatgcaccttctggggtgcatgctcgtctcaatcgcatcggtcacctccttcactggatgaagggaccaaggaggtgaccgatgtgcggtcgaacccgaaaaagttcaaacttttttctgggtctgcctcaagtacgacagaaggcctgcatcatcacggcgttgtggtagcagatcttgcgtcagcgcaaatgtatgggcctcgtaggagtagctcttaggtgggtcccggtggttgcggccagggcgagggtgtcgggtatgtgtagcgctagtcccgggttcgtggtgtgagggcttttgggtgctgacatgcactacccattgctagacgctgtgctgtggcatggctggacgtctagcagacgggttgacatcacctttaggctggcagcgcccgaggccgcaggccagaggaagcggacagcctaacgattgacgtccccctctcctttccccaacctcctggagtcgatgacccggagatagatcgatgtctatgcatcggtgcatcgatatacctatgtatctgtctgtggtttttagaggccactcccgtcgccccgggccgctcagcgataccgcaaggctgtgtgggatcagct

SEQ ID NO: 212 - DNA, 2055 bp, Propionibacterium acnes
  source 1..2055: mol_type = genomic DNA
gcgagccacgaccatcgccaagctgaatggagagcgagcatgagcaccacccctgccgggttcgacttcgacgctctggccgagtgggccgagagcgatgaggcgacccacaccccgcaaaccagccccgtgttccggggcaaggacgccgcgcgcgccagccgcgcattcctcggccgaggacggcccaccctaggcgcggaccacgccaccggcgagggccggtcgccccgccgtcaggtacggctcgacgcacgcaccaacgcgcgactcgacgcctacgcagccgcaaccggcaccagcgcctcccagatcatccgcgacgccctcgctgactacctgcccgcctgatcccaccccaatccactcgggcgcctgtcagtgccccctcttctgggtggtggtccggggcgtcaccgccccggaccagttgggtagtcatctcagttgaaataagcgattagtgatacgcccctcatgctttccggtgctgtcatgagcgtctgacaacagcgacacctcggggcagccgacggacagtcctctggctgccgctctgatcccatgcccacggcacgaaggtgtcggacagctcggtctcgtcatgtgcccaaatagcgtcgtgggcctgtcgccaagcttctcgggagccccacacgggcacgaccgggccacaccggtgtcctggcctccagtgtcgcgacactgtcgatttcggtacgtgcaatgcggcggcggtttgacggatcgacatcccagactcccgcgcgtcccagatcgccatgtggagagtatttgcctccagtgcggccgccacacttgcacgctctcgcgcacgctcgaatgcccgcctagtgctctcaaatgtcgtcacgacgcctccccctgaaaatactcagggtgtcccacggtgggacaccctgagtatttcataccccaactcgcctcaccacacgtcgacctcgacaccgatcaagcgacccgtatcagcgacattgccgtaccgctgccccgcctggtcctccagccacgacaacgcatcccgaaacagcccgacgtcttccaaagctaaaccacagtcgtagccgcccttgtcccccaaccgcacaatctggcgctcccggtggcctccctcgtcgacctcgatccacagtttcgcgtgcatccgctggcctcggccctctgacaggatctcggtgagcaggtcggacgcctgccctcgcgcatcttcgttactgcgggggaattggagtatgtgggaggaacgatgatgggggaggttggtgacctcatggcgcagcaggttgcgcttgtgcatctgctggtcgagacggtcgggctgacctgttgacggggttgagccgtggcgccgcttcctcggcggggtctcgatccgttgctcttccggcggttcggcgtcaggttgtggtgcgcgatctcccctaggacgggggggctcgccacctatatccgagggacgatgagacggccttccacgcttgctgcgcactttcgcagcccgccccttgcggtcacgtcgacgcggcggcggagtgaggtcctcaccgcgcgctagctgcgtcaacgccgccaccaggttggtgcccggtttcagccctttcagcacgtagcgcagcaggcgggggtctcgcttgattcgtcgagcgatctcattctggctccacccctcggccaccagggtgcgcagcagatcctgggcccggctgtcacgctcagccacggctcaccccctcagggatgcctgcctgctcggcctgctctgacagggctgctcgttccgatccggtctgcggcgcttccagagggccaggcaagacacccttgacacgcagccgaccatccttgccatcgtcgccgcccccctgggccacagagagcgcccaggtaggcacgctgctggtgtagatggcgtcgccgtgaatggccagcagacagcgagttctcaacgctcctcccctggttgtggcgtttttcccggtggcggggtcagcgatgggtgtgttgagggtgcgcacgcgcgacagagcccagata

SEQ ID NO: 213 - DNA, 11284 bp, Propionibacterium acnes
  source 1..11284: mol_type = genomic DNA
gtccacgctagggctgccggtatccatgtggtgatggcgtcaatgacggcaacccatgccccgatggtggctagcagggcccacgtcggccacgtgggtgctggggcccacattgtggcggcgatcatggtgaccgcagccgcggcacagaccgcgatcaagcttcggagactgtaggtgtcgcggtaggcgattttgtcgggggtggcggtggccggttcgggcaggatgcgagtgagggagggccatcctgcggtcgcaatggtcacgacggcggcgatccacacgatctggtgcatgggtctcatcatggcccaatatcgatgggtgtgggtggccgacatgggctcagtcgtcgagaggtttgcgggcggttgtggcttcttgggtgccgaggatgagggtgccggagtcgtcgccggctgattcccagtcgacgatgacctggtcgccgtcaacgctggattcggcgatggtcacccattgcccgtccatgtcgatgagcatcccggcggccaggtctgtgacggcaaccgggtggggtgggctgtagaggaggtcgatgtcgcgggcagggtcgtcgggttcttcggttacctcgggtggggtcgatctggctgtctcggtgtcgtcggccaggtccgctcccaggatgcgttcccattcggggctggttttcttgcccgctgaggccatcgtctcgtcgatctgttcgtcagtgggccacacaaatttctttttggtccaggtcgtggtgtcgggtcgcagctgatccagcagttccaggtcttgcggggagtgggccttgcgggggtcgggggtgtagaagaattggacttccttgggggctgattcgccggataggtaggtgcctcggccgcgtttgccgaacgggatgcccacgccgatgtgttcggagccgaacatcatgcgggctccgtcagcggacaggggtccggtggcggcacgcccggagaagttgtctcggatttcgccgcccaggaactcggcgtcggggcgttgggtccccagatcgacgtggatacggcaggcggctgccatgcgcagcagggagccgatccagccgaaaacggggcattctccgggcatcccagagaccttgatcgttgaccaccagtttttcgcgttgccgtagaactggcggtactcgtcgatgaggaccagcacgcgggtgaagtcggtctcgcgggccccttcttcttcgatgcggcggtagcggtcctccatgagagaccacagccagtggatgagggcgacctggtcggggacggtagtggcgaccatctcgatgttgggccactcccgcaggcccaggtactcgatgcgtttagggtcgatgacgaagacgcgccagttgcggcgggcaccctcgacggcgtcgccgatcatggacaccgtttttccggtacgggtgcggccggccttgagctggtgggccatgacaccggagatgtcccagaaacaggtgttgccgtcctcgtcgacggcctgggggattttctcccagtctggggagtctgggcccggaagggccacgggtcggggcaccatcgagggcagggggtggcggcgggtgacggtgatggtgtcgtgttccaggtcgaagtcgctgcgccactggccgagcatcatcgccgaggtcaccgcggccaggcgcaattggatgttcgggctggacaaatgggcgccacgttggtggtgaatggtgaagccgtccaggttcccccgatcggttttccaggaatcgacggtgaccgccgacccatagatctgagtggctacttctttagcccgttccttgtctcggtccagatcggttttgtcagggtcaggggtcggggcgcggtattgcaggacgaaccggccggccgggatcgttgcggatgtcaccgtgaactctgccggcgaccaggcagccgcggccgcctgggtgagggccattggcatggtctcgacggcagcctcctcgggggggatggtgagggtcaggcgtcgcggatgcgtcttcttgcgattccatgtgactttctgcttcaccggcaccttcgccgccgactgaatggctaggcgagctgattcggcagtttcggtacgccggccagcgcgtagcgcccgtcgtgcgtgaaggctgcccaccacagcacagcccatacacggcagccaccagcgcggatcagcggctgctgcatagcccccggtagctagtaccgcacctgaccagccggccgcgatacttttccacgccggtttcgcgccaccaggaccagcgttatggacggtctgcttcgaggctgcggagggacgagacagcggagtgctggtcatgccgcggcctccttgtggcaggtcatttcacaggcatgccggccagcgatgatgccgtggcgcaccgccccggtagccgcatagaccgcgcacaactcaaacacggggcacccatcgcaggccgccgggttcatgctttctttgtcccacgatggtgggtcatcggtgcacggcacggccaggccatcctgttgagcggcgctgatagcggtgaataggcgcagctgggcgcgaacttggtctggggtcaggttgacggtgcgggctacacgcatggggttccttcctcttcaccagtgaaggttccctagacccggccgatgtgcggagggatttcagtgttttatcgaggtgaccagccagccggtctgcgctgcgggttcaggtaccagggtcagatgcagcatggtgtggtcggctaggggcacggcgaccaggggcccgtcggcgctcgccccggtgagggtgggagttccggccacggtggtggcgggaatctggttgggtttcgcggccatcagggagcccatgagggtcggggcggcgatctggacgagggcgactttgcgggcggcgggatcgcgggtcaaccagccgcgggtgaaggtgagcgcagccgacgtgatatcggggctcagcggggctggtgtggcggcggggtggggcgttgaggagggccatacgcgcggtagcgctggcgacatcgagcgggtcggagtggggtcaggtgtagggcttagggtccgatgtggcgatggggctaccgccccggtggtgggagacgagactggttgggggtggtgttgagggcgtgggatcagggtgaaggcagccaaactggccgggatgaggatgacggccgcgccgacacttcggagcgaggtcatgtgacgatccttcggtagctcgacgggttgccgtagatcttttccacgttgatgccactatgtgggttgtcggcgctaaccatttggcctccaccgatgtagacggccacgtggtgggcagggcttccccagaggatgaggtcgccgactttgagctggtcacgggccaccgcggtgccgactttctgctggtcggcggcggtgcggggaaggctaatgccgatacgccggtacagcgccgaggtcaggcctgagcagtcgtagccgccatcggctttgccgttgccaccccacacgtaggcgtaggagttgttgtcggcgatcgatttggcccatgccacggcttcggccaggttcttcgacacaccggtctcgttagcggccccggtggcacagttgtttgacaggtgccctgtagtagtggatcccactatttgtttggccatggtttcccatttggcgtaggcatcgggcagggctgagccttgcactgcctgagctgcctgcgtcagcggcatcttctgccagtcagcgatgtcgactaaaccgggaatgtggaatccagggccgccggccgatccggggccagcgtaggtgatggtgtggcctttcaagaacgcctcggtggcgtaggcatcattgttgacctgatccagagtcccgtaccagcccggcaggatgcgctgctgaaaggggccggcgtcaccgtcaccgttagccttcgctgaggtagggtcggccccaagatctgattcttgtttggcggtcatgatagcgatgaccgctgcctgggtaggcagtttgtcacgctggaccacagtgacgatggtggtcacgagctgcttctgcctggccgtgaggcctccggcacccacagtgcctccggtgacggtacccacgcaagcatccccgccgacactgccaccgccgccgccagagttgtcgtcgagggccccagagcctactgacagcagcggcacaatgatcacggtcgcgggcaagaccgccaggcccgccagcatcagcactgctgcactcaccacggcgatcacgtgagatgctttcaacgctgcccacctttcgctggtttgagggggcgacgcctgctggtacgcacaggcttggttggtccagtccgccgttggttggcaggcctgggtttgatcggcttgctgggacccggtttgggctccggagtcttaggctccggcttcacatgcctaggcacttcggctgcggtgggaggagtcagcacgtggcgtaccggcttggtgaccttctgggcacccgaaacaaccggcttagacaccaccttggcacctttgaccaccggtgcggctgccttcgcgccggccttcttgactgcacgatgcgctttgatagccccggcctcggcccggccaaccctgctagcagtagcatcgagggctctgtggcccgtcgttgccctcaccggtgcatccttgccctggcgggtctgcttagcgatcgccgacatgccgcctcgcaatgccgaaacatgattgtgggcgtgggcgatcgccgacatgccggccgtcgcgatttttgactggccctgcggggcccctgccccagcacgaatctgctggtaagccgccgacgtgccacgagcacccgccgccattcgcgccaccttcgcagccctagtcactcccgtcgacacgccacccgtggctaccgcagcagcacccgagaccacagtcgaggccatccgccttcgacccaatccggtgagcttgcgaccaccgctgcgcaccatccggcgagcaccccgcccagcccactggccaatcgccgacgccccttcggaacgcttgctgcgcatccaatcgttgatcttgtccctcagccccttctcgcccttgtgacgacgccacatggacatcaagaacccgataatccccacgagctcgagcatgttgacaaccatgaccttgatggcgacatcaccgtcagaggcgaaaaccgacttgatgatgagcatgaccacacccaacatcaccatcgacccgacaatgccgatcatcgagtacaagatcgaacacagatcccggatgagcggatctgtgcggccagggatagcccgcaacacgttgagcatcgacatgaacgccgaccacaccaacttgcacacgtagaaccagcacatgcccgcgaacaccagcaggaccacagccaaacccgccaccgtcgacgagtaaaagaagaaccccaccaaccacgaaccatccgcaatatcgccggcgtaatccgacaacccctcatcacagtcaccaaggtcgtcgcgagcatccgagacgtcatcgtaagggccacccttgagcacctcgatgtacttgtcgtggcacttcgcatcaataatgcggccatagttgagctgctgatgaaccggcgccacgaacgagtccacaatgatcgccgacagcttcggatccttcgagtctcccgtcgaggtcatgtcatcaggaatctcgacctcaccagcggtcgccgtcgcaggatcaaccgaactggtaatcatatgagacagcgccacaccgaactgctgggtgcgagccagcggagtagccaacgtcgtcgtatcgcctgcgaacttcgccaccggggccgccaagaaacccaacgccagcgccgcagcaatcgccgcacgcgcacccgtagcccacgcccctgccgtacgtcccctcatcatcttgacgaccacgcccacaccggcgcacgtcgtcagcaacgtcaacaccgttccaccccagctgtccgctcccagcggggccaaaaccttgtcgtggatgtcgttctgtaaccccaccagcggtccggtaatccacccgacccagctcatcgccacggtccagtccaacaaccggcacaacagggcaatgaccatcaggtacgtgttccaacacatgccaataatggaggcccacatagccttcagcggggccgtaacgccaccatcgtccatcgacatctggtactgaaacaagtgaataccgttggagtcagtcacattgaaaccgtcacccatccagcccagccccgggcccgatgccatggcaggcacactgctcagcgccaccaccagaaccagcgtggtgacgatgatacggaaccgccgctccccggccccggggcggcgtggatgacggctcacgctgtctcctggtcgtgctcgggcgggttggagctggcggcttcgcggtggggagcgtaggcaggtctcagtagtcgaatttcaccgacgttgccgtgttggtcggcgtacaggccacaaccggggcctccggggttgagggcaatcttgaccaggtcagcgaactcttcaggggacgttttagggtccacgcccaggaactcgacacctttctgggcgaggttgatgttgtcgcacagcaacacgatgcgatgctgaatgaggttgcggacggtctcgttggggtaatcggcctcggggtcgtgggagccggtgataagccaggcattggctcggcgggattcgcgcacgtactcgtcaatggcgtgggaggcttccggcgaggacgacatgtgatgaaactcgtcaacaatgaaagcggcgtcgcgggcccggtcgctgaagcacaccaggcgagccagacgggcaatgagcgcgtagagggctcggccaaacaccttgtgcgggggcagctgccgaaacagatgttctgacagcatctcctcggcgttaggaagagcgatgccacaagtgccaatgatgaggatgtcggcactcaggtcggcgggaggaaggtccgggtcaaagatggccgaagctagggaggccgagttctcgatgtcagcgaacacggcaatcctgtcagcgatcgcggtggcctcgggaaggtcgcactcctcggccaggtggcgggccaaacgcccacacgaggtgatctggtggtcacgcatgtaggccggtttgaggaccttggccagcgtggtcccggccacaccgatggtctccaagttaagcaaggtcagcaagaacgactgggcgacctgcccggccatctccgggggaaggatgcgcagcgggtccagcgacagcttggggtgggccgtgtcgacgatctggcgtctaaccccgtcgatagagttgacaaaggttacccactcccgctcatcggagttgtcggtggcaataatgcgcccgccccgggccgcgatggctgcgcacagccgcttctcggccatcgtcttgcccgcgcccatcttgccgatgaacgccaccgtgttgcctttctgatcctgagtgtcggcatgcaaatcgaggtaggccagcgactgcaacggggagcctgtgaccacagccaacgggatgccggtggtacggcccaaccggtactcaaccaccgggatagatgcggcgaacgcggaggcgtgagtcagctgacggtaggcgttaagcgaggaggagaaccggccaccgggccgggcagcccacagcaagtcctcctgacggcccacgggacgcacccacgtgaagtcaccgaacaccggatcattgacgaacgctcctgccagctcctcggtggtctcaaagtcaggagacgagacagtgacggtgataagagcctggatctcgacctcacgctcatcggcggccagctcggcgttgtagtcgacgagcacctgagcggaatgctcgatagacatgagggtcgaagcctgggtcatctcaccgccctcgacgttgtcgagctgatcgaccgtttgacggatagcccgctgatttttctgcatcgcagcgtgacgggtccgggccactccccggatcgccacgtcgaccggcacgccagtgtcgtcgatacggcccaaaaactcgtaggcaggccacgtcatcgtgcggggcaccttacccagcacgatatgggactggtagacggtctcgccggtgtcggcaccgattttgaggacgcgacgattccacgcctgagccgtccgggacatgtgggagactcgcttgtcatcctcgctggccagcaggtcggaggtcgcggcctcatcgatgaccaactcccccagcgcggcacgtccaacctcatccatgagggcgattccctcgccaggggcatcatcacgcaaccgggtcgggtggcctgacaggtgctgccgaagccagatctgttcatcaacggtgaccgggcggggttggaacgctgccggcagtttcgcaccgaattccttagcctgacggagggcccactcccgtgcgacacggccaggagcggtggtcatgagtccggcggcttcggtgattttgttgagggcggcggtccaggcggtgtgggtgcgtattttctggtcttggttgagtttgatcgataggaaccacacgcgccggcctagggattcggtttcaggctggtcgagggtggcgtcgatttcgtcggcccacacggggtgttcgctcaggtcgaggccggcggccatggcgtcgacgatttctgtggggtcggtccaggtgagggctccgttgaggcagaactcgtggcgggcgaggggcggaataggtcgcggtgagctgcggcgacggtgagggaggcgttctcggtgacgggtcgctggaggggagtgagtcgccaggtggcccagatgtcgccggtggaggtccagacgaggttgtcgaagaggaaccgttcggggatggacatcatgactccttttcggcggcggcgaggaaggcttccaggccgctgcggcgtacagcgttcccggtagggtgcaggggttttctgggggtgggttcagatttcgaatgtgggaggggtttgtggatggtatcggtgtcctcggcgagggcttggtcgagcaggcaggtggccggggtgtcggtagtctcgtccagctcgtcgatcatctcgtcgaggaggttgggggtggtggatgcggcccacacaggtgggatagccggtgcgggtcgaggcggtgtggggaggcggagtttggtttggccccagaggggtgtgtgggtcatgccggcgggagtggtggcggcgtgagtggtcacacgccaccagcccgccagccatgccagaggtgaccaggtccagtcgatgcgaccaacaacgaactgggcgagccatccggcagccagcgcgaaaatgaaaccgcggatggtcatgcccccgtcgataattttgaagcccatcattgcggcaggaactacgccgccgacagcgagcacctgatagatcgtgtagggcccgccaggaatccttcgacctgaggaatccttaccgataatgcggggctgctggcgggcctcggtgtgccactgaatatccacgatcagctcttgcccaatccttgcatcatctgtccgaagaattggatcgcgttaccttcgataagccagtgcgccataccacacacaaacagcatggagacgatcttggccaggctcataccgtgtttgaagatgttgaacgcggcaatgcccacgactacgaccatggcgacggctcgcaccgcggactgaccttcacctgccttgatcgtcgtccattcgaagaggttctgcgattccagtggcagcaggaggaattgatcgagcatgagaggttttcctttcaggaagccgaccgggatggtcccggtactgacgggctggacggcacgggtgtgccggccaggggcagaaggcgtgacggctggtcgagggaggcaacctcccagcggcctgcacggctgacaagagtcaggccgtactggctggtccgggtagtggattcgtcgccggtgggctggcatgtcacggtcaccgtgacggtaatcttctgccggtctgagggggtggggacctcgtcaggtcccaccacatgagtggttttcactgatacgcatggggctgggtcaaccgcggtgaaagcggtccctgggctgctccatctcgacaggtcagtattcccggtcagcatggcggttaggaagcctgaagaggcttgggcggccgggtcggcggtgcgaagctccgaggtgtctaaggtgggggccgaggccggtgcaggcatggggatctgtccaggtagacgcaaggcgatggccttgccgttggaatcgacgtggaccgggactgaccaggcctgtccgctcccggattggccgcccatggtgaccacggtgacctgccacaggctcggatcagacggggagacggtagcgtcataggcggtgacggtggggggcgctggaccaggtttgcggggcatgcgcgcatcggtgatcttggccgccaccaggtgttccagattgtccaagtgcccggagtcagaggtcagcagaagagtagtcacctcgaccgcggtggctgaggcgatctgagctgtgcggcggtcgtgatgggtggtgtcagtgctgacagctgtggtgggagcggatgccggggccgccgaacggaccagggcaacggggccgcatgcgactccgcacagcacgagggcaaggaagcctttggtggccatcgatccggtgtggggccagggacccacgttttcctgtgcctgttttttcttggccgaccaacggcgggacttagggttagcggatgcaccttctggggtgcatgctcgtctcaatcgcatcggtcacctccttcactggatgaagggaccaaggaggtgaccgatgtgcggtcgaacccgaaaaagttcaaacttttttctgggtctgcctcaagtacgacagaaggcctgcatcatcacggcgttgtggtagcagatcttgcgtcagcgcaaatgtatgggcctcgtaggagtagctcttaggtgggtcccggtggttgcggccagggcgagggtgtcgggtatgtgtagcgctagtcccgggttcgtggtgtgagggcttttgggtgctgacatgcactacccattgctagacgctgtgctgtggcatggctggacgtctagcagacgggttgacatcacctttaggctggcagcgcccgaggccgcaggccagaggaagcggacagcctaacgattgacgtccccctctcctttccccaacctcctgga

SEQ ID NO: 214 - DNA, 9776 bp, Propionibacterium acnes
  source 1..9776: mol_type = genomic DNA
tgtgtgggatcagctgtgccgctcccccgacatggcagacagcaccgttgcatgagaactgactgacactgtggcgccgcggaggtctcccgcggcgtccgctggggcgagtgcatgcctgtcagctcatcttttatcgtcatgtttccccttgtcagagcggtctttgcaaagtgacaacgtcaggggtcttgacgacaacatcctcgacaacatcgtggcggtggtctgtgtctcgtcagttcaacgcaccggggaaagaggcaccgctgatgttcaccaccacaaacaccctcaacgatgagtgggaccagattcgcgccactgagatcgattggcatgactgccctgaactgatgcactgcatcgacgttgatgatgtgttggccgtcattcctgccgcccccgacgccatcttgggctacctcattgcccgggctcagggcggtgacgagttggccacccgcactatcatccaagcgttcacaggcaagcttatcttgatggccacggccaccaaggtgcgccgtactaatgacggcttcaatgatctgttggcgggtctgtgggagacgatcatcacgtacccgttggatcgtcgccctgacaagatcgctgcgaacctcatcctcgacacgttgcaccgggttacccggttctggcgtgctgattcccccgatgaggaagaggctcacggtctggtgcccttccctgacactctcatcgccccagagcccgatgaggacgtcacagctagccaggccatcgccttggcggtggaccgcaactggattaccgaggacctagcccgcctcatgagccatatttactgtgacggtatgactggagctgatgcgggtcgtctgcatggctgcgctccagctacggtgcgatctcgatgccgtgatggtcgggccgtgttgcagcgcaacgccgagacgatcctggccgtctgctgatccctctcttgctcatgcctgccgccaccctacccctacctgctagaaacatagccatgtctccagcaacgcatctagcatatcttctagcaattgatctagctatgtatatagctgatgatctagctatcatatagctgtgtctccagcccaaaggacagcccaatggcatgcttgccacaggaaggtgcgtcagcctcccgaaatactggaaggagctttaccgtgcaggacatgacctcgaccagaccgattgaccgatccccgttcgaccgcactattgcggtgtggaaccacaaaggcggcacgttcaagacgtccgtcgtggcgaacctgggatacctgttcgccgccggtggcaacaaggtgctgctggtcgacatggacccccaggccaatctcgacattgacttcggtatacccgcgggagaacgtgaacggggcatgggattagccgaggcgctacgtgaggggacggcccttcccccaccgcagcatctcagcgaaaaccttcacctggtcagtggcggcgctgctctcaacgagttcaccgaccccgcatccttagcggccatcctcgaccgagtcaccaccgcacgctacgacctgctagctcaggcccttgccccgctggcctgggactatgacctcatcttcatcgactccgggccggcacaaactctgctgtcccagaccatccttggagtagcccgctggctggtagtgcccacccgcaccgataacgcctcaatcactggcctcgtcgacgttcaagacgccatcgacggggttgcctcctgcaaccctgaccttcaactactcggcgttgtcctagccggcgtgggggcccgggccacccggatcgccgcagataaacgccacgccatcgacacagtgctgggggcaggaaccgttttcgatgcggtcatccactactccgagaaggtgtccgtgctcgcacgccagcagggcaagaccgtcgccgagctagccaacgagtaccacaacacccagcccgcctacacctacctagctaaaggccagaacatccccaacgtcgccaaggcagccgtcagcatcgaaactgattatctgaggctggccaccgagatcagcgaccgcatgttcaccagcgacgagcaggagcctgatcatgactgacgatccgactccatccgagcagaacaaccccaccagcgacgacatgcgcttggccgaagaatgggccaacagcggccgcacagtgggagccctgccgcgccgtcaacggcctcagcgacccacaccccgcaccaccagccaaccccctgtctcgtcccctgacacaccggctccgaaaaaaccccagaagacccccaccagccagcctggccgtcaacggatcaacgtcaccgtctacgttgtgcccgaactccatgagcggctgcgctcccgatcggcggcgacgggggtgacggtctcggatctggtggtgcatgcgttagcgttcgtcgccgatcatgcgggggaggcgatcgccgatgatctgcgcgtcgagacgggccccggcatgggggccggactgttcgatgtgaccccatcgcggccagtaggggtcgccaaaacccagctgggggtgcgaatgacccgccacaacaaggatggtttggaccagctgacccggacgagtggagcccgtgaccgcagccatcttgtgtctgtcgccgtgcgcgactatctcgactccaaccctgtaaagaaaggccgacatgtccgctgatgaaactcctgccgcccggggtgggcgacgctttgatacgaccgtcaagcccaggcgccgtcccatgcttatcgccgccggtatcgccatcgtgatagtcggcgcgctcctcatcactcagttgattcgctccgcccaaaccgagcatcgcgtgctggaagtccacgccgatgtggctcgcggcgaggtcatccgtgacaccgatctggtatcggtgactgtcggccaggtcgacaacgtatcaacggttcccgcagaccagctcgactcactggtcggcaaacgcgccacggcagatcttcgagccggatcactcttgcctgctggggctatcggcccggccgatgtcgttccagctccgggcaagtcgctggtcgggctgaagctagccgccggacagatccctatcggagaccttgctgccgggacgaagctgcgcctgatccagacgtcggcacccagcggctcatccaccaccactgatagcagcaccaataccgatggccagtcgtgggaggcaacaatggcgaccggcaccaaaaagaccgagcaggtcaccttgatcaacgccgaagtgaactcgcgtgatgccgcccggatcgcccaactgacgtcacagggccgtatcgccgtagtgaaggatccgatccgatgagcaccattgttttgaccagcgtctcgggagccccaggggtcaccacgacagcgatcgggctgggcagggtctggccacaatcgagcctggtcgtcgaggatgacacccaccacgccatgctggcgggctacctgcgagcctcccagcacgccgaaccgaacctggccgcagtggcgaacctgacgtcgactccaaccaacgcccaaacggtgtgggaatctatcgccagacccctacccaccgatgacccagtcggcgggctgcgacgcaaaggcatcctcggcccgcccacgccgtggtctcgcgcaggcatcgacccccgatggggattcatgctggccctgtggcggcaactggaggaggctggcatcgacaccatcatcgatttgggtcgcctagccacaccactgacctcaacgccacacctgatcgccgcacccatcgtcgaggacgccgacatgatcttggtgatgatcgaggcgacactacgcgacatcgccggcgcccgcacgatggtggagggactcgctgagcagatgaacttggccggcgcctaccgacgtctcggactgcttgtccaccgtggcggccaggcccgcggcgtcgccgagttcaatgacaaggagatcacctcggcgttacgactcccggtcatcggggccattacccacgacccggccggagccgcccaactctccgacggggtcgggcagcggttcgacaagtcacgtctggcccactcactatcaaaggtggcggccagcctcgtcgatgccataaacaagcgccacgctgatgacgaggaggatctgtgatggccagttttgctgataatccgttcgacaagctgcgctcccaggatgcggcaagagcttcggtagagcaggagcctgatgccggattagcgtcggagttgttttcgacgtcgtcggggtgggccagctctcagcaggtgtcccaagctcaaccggtgatgacccgttcggagaacgtggattggccggttgtcgcggagctagccagtacggccactgatgaggttgaggctgagatcagcaggtggagttccactcatgatggggtggcgacgctagacattcgccaggccatcgcggagcctgctattgcctcggcggtgtctacgtatgctgaccgacgccagatcgatgtaggggagacctggcctgatctggtacgccagcgataccgcaaggctgtgtgggatcagctgttcgggatggggcggttgcagccgctgttcgaaatcagcgacgccgaaaacatcatcgtggtgggtaaccatgaggtggttgtcgaccacaacgatggttcccggtcaacgctgccgccggtggccgactcggatgccgagctggaatcccagatcgcccggatggcgaggaatgcgaccccgcggcgagccttcgacgccgatcacaccgatgtgacgatcatgcaccaacagaagttccgtatccacgcgatctcttcggaggtgtcgttgcaaccgtcggtggtcatccgccaacatttgctcacccaaatcagtctgggggacctgtcccagcggggaatgatgccggtggaagtggcccggttcctcgatgaggcggtacaagctggcaagtccatcgtggtcgccggcgagcagggggcaggcaagacgacgtttttacgagcgttgatccacgccattccgatgcgggagcggttcgccacgttggagaccgatcaggagttgttcgctcatctgatgcctggccgggaaaacacgctggtgctgttcgcccgtgatggtaacggcgaggtggatccggcgactggcacccagcacggcgctatcgagatcgcccagctgattcctcctagcctgcgccaggcgttaactagggtcattgtcggtgaggtgcgcggcaatgaggcttcggccatgttccaggctatgcagtcggggactggcactatgagcagtatccactccccgcgagcctctgaggtgccgtcccggctagcccaaatgatttcgatgggcccggtctacgatctggatcaggccatgctgcagatcggtcattcgatcgactacatcgtctttgttcgtaagcgtgacctgcctgatgggagccggctgcgatttgttgagcagatccgttcagtctcgcctggtgattcgacaactcccagtcttggcgaggtgtacacggctgactcgtggacaggccagccgcttacgccactcatgcctggttcggccgccgacgagctgtctcacttcgcccgagacctggattactgcgaggcccactcatgaacactcccgcactaaccagcgccctcatcgtgaccgggttggggctgatcctggccatcgacgggctggtcccggcgccgcctcgacctggtgccccgctgagcccggcccagaggtgggctcggctcacccaccgtcccacaggagcggccgggcgtcgccgggatttgcgttgggggttggctgttctcgtcggcgtcgtgctgtttgtgctcaccgggtgggtggctgcgctggcgttgggccccatcattgtgttgttggcccccaccctgctgggggcggccccaccgaccgatattccgctgatggaggcgttggatcggtgggtgcgtcaggtcgctgcggtgctgccacaggggcgagacatcatcacagcggtgcggatctcacggccgcgggccccgaagctgatcgccgggtcggtggatcaactggtgtcccggttggatggccgtatggagccgagggaggcgttccagcggatggccgacgagctggactcggctgaggctgacgcggtgctggcctcactagcgttggcggccactcatccgcggggagcctcgacaacgttgaaggctattgctggcaacatccaacagcggttgaaagtgctgcggcaggtggaggctgagcggtctaagccgcgtaactcggtgcgccagatcacactggtcacgatcgccatgttcggggggctgctcgtgatcggacggtcgtttctggccccgctggcgacccctcccggtcaggtgctggtggccgtggcggtggtcatgtatgtcatcgcactagtgcagatgtatcggatggcgcggccccgtcgacgcacccggatcatggtcaggaggacccgatgaccattactgctttgtccctgctggccggggccatcgtcactgtcggactgctggtcatcgtggcagcgttccgcccagccccaggccctgacctggttgccgctctggaggtggtgtcgggtcgcacctcaagcgtcgccgagaacgtcgaccagacccggatcgggcggataggtcgcagcgtgacccgcacattccatgtgtcggtgtccccggccatgcgggccgcactgcgactccaaggcacgacccccgaagcgttctacggtcgacgcctgatctgcgcactgatcggggcgatcctgccgtggctgctcaacgcggtagccatcgcggtaggggcgaattccccgaacctactcatcccttcggcgctgtgtgtggcgttagctggcgctggatggatgctgccggcagcacggttgaaggctgcggccgggcccaccaacgatgactcgttcgaagcgctgctggtattcatcgatttggtcgtgctggaacggctcgccaacgaaacctccgtcgacgcgctcaccaatgcggcaaacatgtcggactcgccgctattcgtccagatccgtcaagtcctcaaccgtgcctccctggaaaacgtcgacccgtggaacgggctagaccggctagccgaggacatcaaactgcccgaactcaccgatgtggtctccatcgcccgcctccaaaacgaaggcgcctccctcgtcgacagtttccgggcccgagtcgccgagttgcgcgacgcctacctgctgcgcctgcaacaagaatccaccgccatcacccagcggcttggtttgtggacgatcctgcaagccggctcggtcatgctcatcttgctgggggcggccgccctcacactcatcacagccggataaaccgacatcgtgtcgagcccccatatgggccgcgaacctttcataatgatgcctgtaagcaccacaatattgatcacaacctaacaatgaaggagaaatcatgatgaccgatctcgacctggctaaaaaacagatcacctggctggcggcgcacctgcgttcccggatcgttgacgagcgtggcggtggtagctctaccgtggagacactgatttggattggtgtcatcgtggcgctggtgattggtgtgggcgtcggggtgacggcctatatcaggtcgaagatgcctcactgacgacgatgcgtagcaggttcacaactgatcagcgtggcggtggtagcgcgtcggtggggatgctcctgctgatgcctgcgatcatgctgctggcattcggtgggatcgaggtcgggatgtggtgtcacgcccatcagtcgaccatcgcggcagcccaaagcgccgcggaggctcagcgtgtcgtccatccggtcccggggtcggcacaggaggcagcctcgcagatcactagtcatggcggggtgcgtgatacccggatatcggtcagtgatgacggggccactgtcacggtgaccgtctcaggtcgggccccatcgatgctggggctgcatcttccggctgtgtcgtcgacagcgtcgatgcccaaggagcgcctgtcgtgaggcgaagtgagcgcggtggagcaagtctaagcgtcgaggtgctcatgtgggcgccgatcgcgctggtgatcatcgggtttgttgtgggtatcggccggatgtcgatggcccaggacgcggtgaatggcgcggcgggtgctgcggcccgtgcggcgtcgttggagcgtgatggacagtcggctcagtctgcggcgcagcaggcggcgtcggcgaacctgtcgtccggtgggctggcatgtgcgccgagtgtgagcgtggacacgtcagtgtttgcccgtcctgccgggcaggcgggcacggttcacgccacggtcacgtgtgtcacctcgctgggtcttgggttcgggtcccggacggtgcacgcaacggggtctgccccggtagacacctatcgggaaaggagaggctgagatggcccgtgatgagcgtggtggcggctcggtgtcggtgtggatgctgctcatggtgccggtgattctggtcatggccggcctggtttttgacgggtcccgtcagatatcggcaacccaggcggcccaggacgcggcggttgcggcatcccgcgccggaactgatgcggcagcgacaccgcagcttgctggccacgacggggcggccgtagcagtccaagcggcccgccaggcactatctgctgccgggggggacgggtcggtgcaggaggacgggtcgaccatcacggtgaccacgtctcaaagtcggccgacagtgttcctgtcagcgatcggaatcagccaggtaagggggcatgggcaggcccatgctcagcttgtgggaccgggagaacgcccatgacagtgatacgtcgtatcggtgccctggtggcactgctggtggtgatagccggcttaccggccgggctcgtggccgcaggcgccccgctagtaccctcgggcctgtcatgggcccatgtgcggcatctgttggttaccccagacatgaccgggtcggtgctggtgtggctggtcagcctcatcggctggatcgggtgggcatggttcgccctggccgtcgcagccgaagcggtgacgatgctctcagggcagcggctgcactggcacatgcccggccctcgcctagtgcgccgagtggcagccggtcttctcattgccgcgttcgcggccgcaccggcagccacaagcacggctcacgccgccgaggccacccatgtggcggtcgccgcccaggctggaccggcacacgcggcccccgcccaggacagccccgtcaccacctctcaggccccggacgcctccaccactccgaaaatctggaagacctacacggtgcgggccaacgactacctgtggaagatcgccgagcactactacggtgacggcgcccaattccgtcgtatcgccgaagcctccggtatcgacccgcactcagagctgaaagtcggccagaaactgatcctgccggttcccgagaacacggccgcagttcattcggttaaagcgggggagtatctgtgggagatcgccgagcactactacggtgacggcgcccagtaccataaaatcgctgaagcttccggtatcgatgcccattccgatctagccgtgggccaaaaactcgtcatccccgggcccctccgccacgacgccacgccgccacaccactcggcgtcgacccacgcgaag

SEQ ID NO: 215 - DNA, 2238 bp, Propionibacterium acnes
  source 1..2238: mol_type = genomic DNA
gacgccggccaccccaactactccgacccacacggtgaccccagctccggcctctgccggccactcgaccagcgacgagcacccactccatacggataccgccgcagcggacaaggccagcaacgaggacgccctgtccccaatccaggtgggtttgaccgccagcgtcggactggtgctggtcgccggactgatcaccaccctcaaccgccgctaccggacccggttcacccgccagccccgcggcaaggccatgaccctgcccagcccggacgcccaaactgccgagatagcgctgcgcagcaccggggcgactgacactctgacgatcacctgcctcgaccaggcgctccgcgcgatcggcgcatggtgccaccactgcgggcacccgctgccacccctgctggccgcccgcgtcgatgacgaccggatcgacctgctgctatcccaggcggcccccgaccatcccgaggcggtggagctggccgccgacggatcggtgtggaccctcaccgccgaccggatcgacgacctgctagcccacaccgatgacaaccaagcggctccgtggccgtctctggtcacactgggacgcgacgacgacggcgcccacatcctcatcgacttggaagccgcaggaaccttgcacctgatcgccgatgacgaccaggtcgacgcggccctcgccgcgatcgccgtggaactggccacctgcgactggtccgacgaagtcaacgtcaccctcgtcggccaggtgtgcccgggcctagaagacgcactagagtctccgaccctgacccgcgccaccgacgtggacaccctcctcaccaccctagaagctcgcgccgacgaccagcgacacatcctcaccgaaggaaaccccctcgccgctcaccgagccgaccccgccatctccgacgggttcgacgccgaagtgatcctcctcgacaccgaactcaccgaagaccaccgcaaccgcctcgccagcctcgtcgaggctcttccccgcgtgtcagtcgccgcggtaacaaccagccccaccagcccagacgaatggtccctcaccctgacaggtgacccactagccgccgacctggctcccctcggctggcacatccacccccaaaccctctcccccgacctgtacaaccgcatggttgaactactcgccaactccgccgccgcagactacgaacccgccagctggtggaaccacgacgccgacgacgagcccaccaccgaccccaccaacgaggaagaatctaccccgagcaggcgagcccgcccgaatatccgcctgaccaccctgaccggcggcatcgacctatccagcgtcgacatcgacgacatcatcgacgaagccaaccaggccctcgacaacaccgaccagaccaccaaccaggttcgcgtcgacaccgaccaacccggcaccgacacccccttccccatcgacgacatcgacccgctgagctccgaccacccggtcctatccatcatcggccaccccgacatcacaggtgccactggaaccgttgggcgctccccgtggcgctgccaacagttggccctctacatcgctgagcatccgggagcatcgggggcgactatcgccgatgatttggggctatcagcgtcgacggtgcgctcgattgctacacacctgcgacactggttgggagccgacgatgccggggtggcttacatgccggcggcgacgcgcggctaccggctcgatgagcggatcgtcacagatgtggacctgatcgacgctgctgtggccggggcaggcattaacaccgctgagacggccacactggtggccattttgaagctgggccgcggacgggtcttcgctggggttcctgactcggaacttcgccagttcagggcgtcgatgtaccacgtggaggcccgcatcgttgatgcggctcttcaggtgacggatcgggctctggaagccggggacttggggctggcccggtgggcgttgacccaagggctactggtgtctcccgatcatgaggacctggtcgccggttgtctgcgcaccgagtaccaggccggcaacatggacaaggtttccgagctggtcgatcacctgtcggctaccgcacgacgcctgggcgtcgatttgagcgccgacaccacccggatcatcgatacggtcacccacgccgacaggagagcgtcatgatctcccctgcactcatctccgtcaggaaggttcctatgcaccat

SEQ ID NO: 216 - DNA, 10907 bp, Propionibacterium acnes
  source 1..10907: mol_type = genomic DNA
ggcttcctgtgcgccgagcatgagggtgccagaatcctcgccagccgattcccagtcgacgatgacctggtcgccgtcaacgctggattcggcgatggtcacccattgcccgtccatgtcgatgagcatcccggcggccagctctgtggcggcaaccgggtgggctgggctgtagaggaggtcgatgtcgcgggcagggtcgtcgggttcttcggttacctcgggtggggtcgatctggctgtctcggtgtcgtcggccaggtcggctcccaggatgcgttcccattcggggctggttttcttgcccgctgaggccatcgtctcgtcgatctgttcgtcagtgggccacacaaatttctttttggtccaggtcgtggtgtcgggtcgcagctgatccagcagttccaggtcttgcggggagtgggccttgcgggggtcgggggtgtagaagaattggacttccttgggggctgattcgccggataggtaggtgccgcggccgcgtttgccgaacgggatgcccacgccgacgtgttcggagccgaacatcatgcgggctccgtcagcggacaggggtccggtggcggcacgcccggagaagttgtctcggatttcgccgcccaggaactcggcgtcggggcgttgggtccccagatcgacgtggatacggcaggcggctgccatgcgcagcagggagccgatccagccgaaaacggggcattctccgggcatcccagagaccttgatcgttgaccaccagtttttcgcgttgccgtagaactggcggtactcgtcgatgaggaccagcacgcgggtgaagtcggtctcgcgggccccttcttcttcgatgcggcggtagcggtcctccatgagagaccacagccagtggatgagggcgacctggtcggggacggtagtggcgaccatctcgatgttgggccactcccgcaggcccaggtactcgatgcgtttagggtcgatgacgaagacgcgccagttgcggcgggcaccctcgacggcgtcgccgatcatggacaccgtttttccggtacgggtgcggccggccttgagctggtgggccatgacaccggagatgtcccagaaacaggtgttgccgtcctcgtcgacggcctgggggattttctcccagtctggggagtctgggcccggaagggccacgggtcggggcaccatcgagggcagggggtggcggcgggtgacggtgatggtgtcgtgttccaggtcgaagtcgctgcgccactggccgagcatcatcgccgaggtcaccgcggccaggcgcaattggatgttcgggctggacaaatgggcgccacgttggtggtgaatggtgaagccgtccaggttcccccgatcggttttccaggaatcgacggtgaccgccgacccatagatctgagtggctacttctttagcccgttccttgtctcggtccagatcggttttgtcagggtcaggggtcggggcgcggtattgcaggacgaaccggccggccgggatcgttgcggatgtcaccgtgaactctgccggcgaccaggcagccgcggccgcctgggtgagggccattggcatggtctcgacggcagcctcctcgggggggatggtgagggtcaggcgtcgcggatgcgtcttcttgcgattccatgtgactttctgcctcaccggcaccttcgccgccgactgaatggctaggcgagctgattcggcagtttcggtacgccggccagcgcgtagcgcccgtcgtgcgtgaaggctgcccaccacagcacagcccatacacggcagccaccagcgcggatcagcggctgctgcatagcccccggtagctagtaccgcacctgaccagccggccgcgatacttttccacgccggtttcgcgccaccaggaccagcgttatggacggtctgcttcgaggctgcggagggacgagacagcggagtgctggtcatgccgcggcctccttgtggcaggtcatttcacaggcatgccggccagcgatgatgccgtggcgcaccgccccggtagccgcatagaccgcgcacaactcaaacacggggcacccatcgcaggccgccgggttcatgctttctttgtcccacgatggtgggtcatcggtgcacggcacggccaggccatcctgttgagcggcgctgatagcggtgaataggcgcagctgggcgcgaacttggtctggggtcaggttgacggtgcgggctacacgcatggggttccttcctcttcaccagtgaaggttccctagacccggccgatgtgcggagggatttcagtgttttatcgaggtgacaagccagccggtctgcgctgcgggttcaggtaccagggtcagatgcagcatggtgtggtcggctaggggcacggcgaccaggggcccgtcggcgctcgccccggtgagggtgggagttccggccacggtggtggcgggaatctggttgggtttcgcggccatcagggagcccatgagggtcggggcggcgatctggacgagggcgactttgcgggcggcgggatcgcgggtcaaccagccgcgggtgaaggtgagcgcagccgacgtgatatcggggctcagcggggctggtgtggcggcggggtgggccgttgaggagggccatacgcgcggtagcgctggcgacatcgagcgggtcggagtggggtcaggtgtggggcttagggtccgatgtggcgatggggctaccgccccggtggtgggagacgagactggttgggggtggtgttgagggcgtgggatcagggtgaaggcagccaaactggccgggatgaggatgacggccgcgccgacacttcggagcgaggtcatgtgacgatccttcggtagctcgacgggttgccgtagatcttttccacgttgatgccactatgtgggttgtcggcgctaaccatttggcctccaccgatgtagacggccacgtggtgggcagggcttccccagaggatgaggtcgccgactttgagctggtcacgggccaccgcggtgccgactttctgctggtcggcggcggtgcggggaaggctaatgccgatacgccggtacagcgccgaggtcaggcctgagcagtcgtagccgccatcggctttgccgttgccaccccacacgtaggcgtaggagttgttgtcggcgatcgatttggcccatgccacggcttcggccaggttcttcgacacaccggtctcgttagcggccccggtggcacagttgtttgacaggtgccctgtagtagtggatcccactatttgtttggccatggtttcccatttggcgtaggcatcgggcagggctgagccttgcactgcctgagctgcctgcgtcagcggcatcttctgccagtcagcgatgtcgactaaaccgggaatgtggaatccagggccgccggccgatccggggccagcgtaggtgatggtgtggcctttcaagaacgcctcggtggcgtaggcatcattgttgacctgatccagagtcccgtaccagcccggcaggatgcgctgctgaaaggggccggcgtcaccgtcaccgttagccttcgctgaggtagggtcggccccaagatctgattcttgtttggcggtcatgatagcgatgaccgctgcctgggtaggcagtttgtcacgctggaccacagtgacgatggtggtcacgagctgcttctgcctggccgtgaggcctccggcacccacagtgcctccggtgacggtacccacgcaagcatccccgccgacactgccaccgccgccgccagagttgtcgtcgagggccccagagcctactgacagcagcggcacaatgatcacggtcgcgggcaagaccgccaggcccgccagcatcagcactgctgcactcaccacggcgatcacgtgagatgctttcaacgctgcccacctttcgctggtttgagggggcgacgcctgctggtacgcacaggcttggttggtccagtccgccgttggttggcaggcctgggtttgatcggcttgctgggacccggtttgggctccggagtcttaggctccggcttcacatgcctaggcacttcggctgcggtgggaggagtcagcacgtggcgtaccggcttggtgaccttctgggcacccgaaacaaccggcttagacaccaccttggcacctttgaccaccggtgcggctgccttcgcgccggccttcttgactgcacgatgcgctttgatagccccggcctcggcccggccaaccctgctagcagtagcatcgagggctctgtggcccgtcgttgccctcaccggtgcatccttgccctggcgggtctgcttagcgatcgccgacatgccgcctcgcaatgccgaaacatgattgtgggcgtgggcgatcgccgacatgccggccgtcgcgatttttgactggccctgcggggcccctgccccagcacgaatctgctggtaagccgccgacgtgccacgagcacccgccgccattcgcgccaccttcgcagccctagtcactcccgtcgacacgccacccgtggctaccgcagcagcacccgagaccacagtcgaggccatccgccttcgacccaatccggtgagcttgcgaccaccgctgcgcaccatccggcgagcaccccgcccagcccactggccaatcgccgacgccccttcggaacgcttgctgcgcatccaatcgttgatcttgtccctcagccccttctcgcccttgtgacgacgccacatggacatcaagaacccgataatccccacgagctcgagcatgttgacaaccatgaccttgatggcgacatcaccgtcagaggcgaaaaccgacttgatgatgagcatgaccacacccaacatcaccatcgacccgacaatgccgatcatcgagtacaagatcgaacacagatcccggatgagcggatctgtgcggccagggatagcccgcaacacgttgagcatcgacatgaacgccgaccacaccaacttgcacacgtagaaccagcacatgcccgcgaacaccagcaggaccacagccaaacccgccaccgtcgacgagtaaaagaagaaccccaccaaccacgaaccatccgcaatatcgccggcgtaatccgacaacccctcatcacagtcaccaaggtcgtcgcgagcatccgagacgtcatcgtaagggccacccttgagcacctcgatgtacttgtcgtggcacttcgcatcaataatgcggccatagttgagctgctgatgaaccggcgccacgaacgagtccacaatgatcgccgacagcttcggatccttcgagtctcccgtcgaggtcatgtcatcaggaatctcgacctcaccagcggtcgccgtcgcaggatcaaccgaactggtaatcatatgagacagcgccacaccgaactgctgggtgcgagccagcggagtagccaacgtcgtcgtatcgcctgcgaacttcgccaccggggccgccaagaaacccaacgccagcgccgcagcaatcgccgcacgcgcacccgtagcccacgcccctgccgtacgtcccctcatcatcttgacgaccacgcccacaccggcgcacgtcgtcagcaacgtcaacaccgttccaccccagctgtccgctcccagcggggccaaaaccttgtcgtggatgtcgttctgtaaccccaccagcggtccggtaatccacccgacccagctcatcgccacggtccagtccaacaaccggcacaacagggcaatgaccatcaggtacgtgttccaacacatgccaataatggaggcccacatagccttcagcggggccgtaacgccaccatcgtccatcgacatctggtactgaaacaagtgaataccgttggagtcagtcacattgaaaccgtcacccatccagcccagccccggacccgatgccatggcaggcacactgctcagcgccaccaccagaaccagcgtggtgacgatgatacggaaccgccgctccccggccccggggcggcgtggatgacggctcacgctgtctcctggtcgtgctcgggcgggttggagctggcggcttcgcggtggggagcgtaggcaggtctcagtagtcgaatttcaccgacgttgccgtgttggtcggcgtacaggccacaaccggggcctccggggttgagggcaatcttgaccaggtcagcgaactcttcaggggacgttttagggtccacgcccaggaactcgacacctttctgggcgaggttgatgttgtcgcacagcaacacgatgcgatgctgaatgaggttgcggacggtctcgttggggtaatcggcctcggggtcgtgggagccggtgataagccaggcattggctcggcgggattcgcgcacgtactcgtcaatggcgtgggaggcttccggcgaggacgacatgtgatgaaactcgtcaacaatgaaagcggcgtcgcgggcccggtcgctgaagcacaccaggcgagccagacgggcaatgagcgcgtagagggctcggccaaacaccttgtgcgggggcagctgccgaaacagatgttctgacagcatctcctcggcgttaggaagagcgatgccacaagtgccaatgatgaggatgtcggcactcaggtcggcgggaggaaggtccgggtcaaagatggccgaagctagggaggccgagttctcgatgtcagcgaacacggcaatcctgtcagcgatcgcggtggcctcgggaaggtcgcactcctcggccaggtggcgggccaaacgcccacacgaggtgatctggtggtcacgcatgtaggccggtttgaggaccttggccagcgtggtcccggccacaccgatggtctccaagttaagcaaggtcagcaagaacgactgggcgacctgcccggccatctccgggggaaggatgcgcagcgggtccagcgacagcttggggtgggccgtgtcgacgatctggcgtctaaccccgtcgatagagttgacaaaggttacccactcccgctcatcggagttgtcggtggcaataatgcgcccgccccgggccgcgatggctgcgcacagccgcttctcggccatcgtcttgcccgcgcccatcttgccgatgaacgccaccgtgttgcctttctgatcctgagtgtcggcatgcaaatcgaggtaggccagcgactgcaacggggagcctgtgaccacagccaacgggatgccggtggtacggcccaaccggtactcaaccaccgggatagatgcggcgaacgcggaggcgtgagtcagctgacggtaggcgttaagcgaggaggagaaccggccaccgggccgggcagcccacagcaagtcctcctgacggcccacgggacgcacccacgtgaagtcaccgaacaccggatcattgacgaacgctcctgccagctcctcggtggtctcaaagtcaggagacgagacagtgacggtgataagagcctggatctcgacctcacgctcatcggcggccagctcggcgttgtagtcgacgagcacctgagcggaatgctcgatagacatgagggtcgaagcctgggtcatctcaccgccctcgacgttgtcgagctgatcgaccgtttgacggatagcccgctgatttttctgcatcgcagcgtgacgggtccgggccactccccggatcgccacgtcgaccggcacgccagtgtcgtcgatacggcccaaaaactcgtaggcaggccacgtcatcgtgcggggcaccttacccagcacgatatgggactggtagacggtctcgccggtgtcggcaccgattttgaggacgcgacgattccacgcctgagccgtccgggacatgtgggagactcgcttgtcatcctcgctggccagcaggtcggaggtcgcggcctcatcgatgaccaactcccccagcgcggcacgtccaacctcatccatgagggcgattccctcgccaggggcatcatcacgcaaccgggtcgggtggcctgacaggtgctgccgaagccagatctgttcatcaacggtgaccgggcggggttggaacgctgccggcagtttcgcaccgaattccttagcctgacggagggcccactcccgtgcgacacggccaggagcggtggtcatgagtccggcggcttcggtgattttgttgagggcggcggtccaggcggtgtgggtgcgtattttctggtcttggttgagtttgatcgataggaaccacacgcgccggcctagggattcggtttcaggctggtcgagggtggcgtcgatttcgtcggcccacacggggtgttcgctcaggtcgaggccggcggccatggcgtcgacgatttctgtggggtcggtccaggtgagggctccgttgaggcagaactcgtggcgggcgaggtggcggaataggtcgcggtgagctgcggcgacggtgagggaggcgttctcggtgacgggtcgctggaggggagtgagtcgccaggtggcccagatgtcgccggtggaggtccagacgaggttgtcgaagaggaaccgttcggggatggacatcatgactccttttcggcggcggcgaggaaggcttccaggccgctgcggcgtacagcgttcccggtagggtgcaggggttttctgggggtgggttcagatttcgaatgtgggaggggtttgtggatggtatcggtgtcctcggcgagggcttggtcgagcaggcaggtggccggggtgtcggtagtctcgtccagctcgtcgatcatctcgtcgaggaggttgggggtggtggatgcggcccacacaggtgggatagccggtgcgggtcgaggcggtgtggggaggcggagtttggtttggccccagaggggtgtgtgggtcatgccggcgggagtggtggcggcgtgagtggtcacacgccaccagcccgccagccatgccagaggtgaccaggtccagtcgatgcgaccaacaacgaactgggcgagccatccggcagccagcgcgaaaatgaaaccgcggatggtcatgcccccgtcgataattttgaagcccatcattgcggcaggaactacgccgccgacagcgagcacctgatagatcgtgtagggcccgccaggaatccttcgacctgaggaatccttaccgataatgcggggctgctggcgggcctcggtgtgccactgaatatccacgatcagctcttgcccaatccttgcatcatctgtccgaagaattggatcgcgttaccttcgataagccagtgcgccataccacacacaaacagcatggagacgatcttggccaggctcataccgtgtttgaagatgttgaacgcggcaatgcccacgactacgaccatggcgacggctcgcaccgcggactgaccttcacctgccttgatcgtcgtccattcgaagaggttctgcgattccagtggcagcaggaggaattgatcgagcatgagaggttttcctttcaggaagccgaccgggatggtcccggtactgacgggctggacggcacgggtgtgccggccaggggcagaaggcgtgacggctggtcgagggaggcaacctcccagcggcctgcacggctgacaagagtcaggccgtactggctggtccgggtagtggattcgtcgccggtgggctggcatgtcacggtcaccgtgacggtaatcttctgccggtctgagggggtggggacctcgtcaggtcccaccacatgagtggttttcactgatacgcatggggctgggtcaaccgcggtgaaagcggtccctgggctgctccatctcgacaggtcagtattcccggtcagcatggcggttaggaagcctgaagaggcttgggcggccgggtcggcggtgcgaagctccgaggtgtctagggtgggggccgaggccggtgcaggcatggggatctgtccaggtagacgcaaggcgatggccttgccgttggaatcgacgtggaccgggactgaccaggcctgtccgctcccggattggccgcccatggtgaccacggtgacctgccacaggctcggatcagacggggagacggtagcgtcataggcggtgacggtggtgggcgctggaccaggtttgcggggcatgcgcgcatcggtgatcttggccgccaccaggtgttccagattgtccaagtgcccggagtcagaggtcagcagaagagtagtcacctcgaccgcggtggctgaggcgatctgagctgtgcggcggtcgtgatgggtggtgtcagtgctgacagctgtggtgggagcggatgccggggccgccgaacggaccagggcaacggggccgcatgcgactccgcacagcacgagggcaaggaagcctttggtggccatcgatccggtgtggggccagggacccacgttttcctgtgcctgttttttcttggccgaccaacggcgggacttagggttagcggatgcaccttctggggtgcatgctcgtctcaatcgcatcggtcacctccttcactggatgaagggaccaaggaggtgaccgatgtgcggtcgaacccgaaaaagttcaaacttttttctgggtctgcctcaagtacgacagaaggcctgcatcatcacggcgttgtggtagcagatcttgcgtcagcgcaaatgtatgggcctcgtaggagtagctcttaggtgggtcccggtggttgcggccagggcgagggtgtcgggtatgtgtagcgctagtcccgggttcgtggtgtgagggcttttgggtgctgacatgcactacccattgctagacgctgtgctgtggcatggctggacgtctagcagacgggttgacatcacctttaggctggcagcgcccgaggccgcaggccagaggaagcggacagcctaacgattgacgtccccctctcctttccccaacctcctgga

SEQ ID NO: 217 - DNA, 9469 bp, Propionibacterium acnes
  source 1..9469: mol_type = genomic DNA
tgtgtgggatcagctgtgccgctcccccgacatggcagacagcaccgttgcatgagaactgactgacactgtggcgccgcggaggtctcccgcggcgtccgctggggcgagtgcatgcctgtcagctcatcttttatcgtcatgtttccccttgtcagagcggtctttgcaaagtgacaacgtcaggggtcttgacgacaacatcctcgacaacatcgtggcggtggtctgtgtctcgtcagttcaacgcaccggggaaagaggcaccgctgatgttcaccaccacaaacaccctcaacgatgagtgggaccagattcgcgccactgagatcgattggcatgactgccctgaactgatgcactgcatcgacgttgatgatgtgttggccgtcattcctgccgcccccgacgccatcttgggctacctcattgcccgggctcagggcggtgacgagttggccacccgcactatcatccaagcgttcacaggcaagcttatcttgatggccacggccaccaaggtgcgccgtactaatgacggcttcaatgatctgttggcgggtctgtgggagacgatcatcacgtacccgttggatcgtcgccctgacaagatcgctgcgaacctcatcctcgacacgttgcaccgggttacccggttctggcgtgctgattcccccgatgaggaagaggctcacggtctggtgcccttccctgacactctcatcgccccagagcccgatgaggacgtcacagctagccaggccatcgccttggcggtggaccgcaactggattaccgaggacctagcccgcctcatgagccatatttactgtgacggtatgactggagctgatgcgggtcgtctgcatggctgcgctccagctacggtgcgatctcgatgccgtgatggtcgggccgtgttgcagcgcaacgccgagacgatcctggccgtctgctgatccctctcttgctcatgcctgccgccaccctacccctacctgctagaaacatagccatgtctccagcaacgcatctagcatatcttctagcaattgatctagctatgtatatagctgatgatctagctatcatatagctgtgtctccagcccaaaggacagcccaatggcatgcttgccacaggaaggtgcgtcagcctcccgaaatactggaaggagctttaccgtgcaggacatgacctcgaccagaccgattgaccgatccccgttcgaccgcactattgcggtgtggaaccacaaaggcggcacgttcaagacgtccgtcgtggcgaacctgggatacctgttcgccgccggtggcaacaaggtgctgctggtcgacatggacccccaggccaatctcgacattgacttcggtatacccgcgggagaacgtgaacggggcatgggattagccgaggcgctacgtgaggggacggcccttcccccaccgcagcatctcagcgaaaaccttcacctggtcagtggcggcgctgctctcaacgagttcaccgaccccgcatccttagcggccatcctcgaccgagtcaccaccgcacgctacgacctgctagctcaggcccttgccccgctggcctgggactatgacctcatcttcatcgactccgggccggcacaaactctgctgtcccagaccatccttggagtagcccgctggctggtagtgcccacccgcaccgataacgcctcaatcactggcctcgtcgacgttcaagacgccatcgacggggttgcctcctgcaaccctgaccttcaactactcggcgttgtcctagccggcgtgggggcccgggccacccggatcgccgcagataaacgccacgccatcgacacagtgctgggggcaggaaccgttttcgatgcggtcatccactactccgagaaggtgtccgtgctcgcacgccagcagggcaagaccgtcgccgagctagccaacgagtaccacaacacccagcccgcctacacctacctagctaaaggccagaacatccccaacgtcgccaaggcagccgtcagcatcgaaactgattatctgaggctggccaccgagatcagcgaccgcatgttcaccagcgacgagcaggagcctgatcatgactgacgatccgactccatccgagcagaacaaccccaccagcgacgacatgcgcttggccgaagaatgggccaacagcggccgcacagtgggagccctgccgcgccgtcaacggcctcagcgacccacaccccgcaccaccagccaaccccctgtctcgtcccctgacacaccggctccgaaaaaaccccagaagacccccaccagccagcctggccgtcaacggatcaacgtcaccgtctacgttgtgcccgaactccatgagcggctgcgctcccgatcggcggcgacgggggtgacggtctcggatctggtggtgcatgcgttagcgttcgtcgccgatcatgcgggggaggcgatcgccgatgatctgcgcgtcgagacgggccccggcatgggggccggactgttcgatgtgaccccatcgcggccagtaggggtcgccaaaacccagctgggggtgcgaatgacccgccacaacaaggatggtttggaccagctgacccggacgagtggagcccgtgaccgcagccatcttgtgtctgtcgccgtgcgcgactatctcgactccaaccctgtaaagaaaggccgacatgtccgctgatgaaactcctgccgcccggggtgggcgacgctttgatacgaccgtcaagcccaggcgccgtcccatgcttatcgccgccggtatcgccatcgtgatagtcggcgcgctcctcatcactcagttgattcgctccgcccaaaccgagcatcgcgtgctggaagtccacgccgatgtggctcgcggcgaggtcatccgtgacaccgatctggtatcggtgactgtcggccaggtcgacaacgtatcaacggttcccgcagaccagctcgactcactggtcggcaaacgcgccacggcagatcttcgagccggatcactcttgcctgctggggctatcggcccggccgatgtcgttccagctccgggcaagtcgctggtcgggctgaagctagccgccggacagatccctatcggagaccttgctgccgggacgaagctgcgcctgatccagacgtcggcacccagcggctcatccaccaccactgatagcagcaccaataccgatggccagtcgtgggaggcaacaatggcgaccggcaccaaaaagaccgagcaggtcaccttgatcaacgccgaagtgaactcgcgtgatgccgcccggatcgcccaactgacgtcacagggccgtatcgccgtagtgaaggatccgatccgatgagcaccattgttttgaccagcgtctcgggagccccaggggtcaccacgacagcgatcgggctgggcagggtctggccacaatcgagcctggtcgtcgaggatgacacccaccacgccatgctggcgggctacctgcgagcctcccagcacgccgaaccgaacctggccgcagtggcgaacctgacgtcgactccaaccaacgcccaaacggtgtgggaatctatcgccagacccctacccaccgatgacccagtcggcgggctgcgacgcaaaggcatcctcggcccgcccacgccgtggtctcgcgcaggcatcgacccccgatggggattcatgctggccctgtggcggcaactggaggaggctggcatcgacaccatcatcgatttgggtcgcctagccacaccactgacctcaacgccacacctgatcgccgcacccatcgtcgaggacgccgacatgatcttggtgatgatcgaggcgacactacgcgacatcgccggcgcccgcacgatggtggagggactcgctgagcagatgaacttggccggcgcctaccgacgtctcggactgcttgtccaccgtggcggccaggcccgcggcgtcgccgagttcaatgacaaggagatcacctcggcgttacgactcccggtcatcggggccattacccacgacccggccggagccgcccaactctccgacggggtcgggcagcggttcgacaagtcacgtctggcccactcactatcaaaggtggcggccagcctcgtcgatgccataaacaagcgccacgctgatgacgaggaggatctgtgatggccagttttgctgataatccgttcgacaagctgcgctcccaggatgcggcaagagcttcggtagagcaggagcctgatgccggattagcgtcggagttgttttcgacgtcgtcggggtgggccagctctcagcaggtgtcccaagctcaaccggtgatgacccgttcggagaacgtggattggccggttgtcgcggagctagccagtacggccactgatgaggttgaggctgagatcagcaggtggagttccactcatgatggggtggcgacgctagacattcgccaggccatcgcggagcctgctattgcctcggcggtgtctacgtatgctgaccgacgccagatcgatgtaggggagacctggcctgatctggtacgccagcgataccgcaaggctgtgtgggatcagctgttcgggatggggcggttgcagccgctgttcgaaatcagcgacgccgaaaacatcatcgtggtgggtaaccatgaggtggttgtcgaccacaacgatggttcccggtcaacgctgccgccggtggccgactcggatgccgagctggaatcccagatcgcccggatggcgaggaatgcgaccccgcggcgagccttcgacgccgatcacaccgatgtgacgatcatgcaccaacagaagttccgtatccacgcgatctcttcggaggtgtcgttgcaaccgtcggtggtcatccgccaacatttgctcacccaaatcagtctgggggacctgtcccagcggggaatgatgccggtggaagtggcccggttcctcgatgaggcggtacaagctggcaagtccatcgtggtcgccggcgagcagggggcaggcaagacgacgtttttacgagcgttgatccacgccattccgatgcgggagcggttcgccacgttggagaccgatcaggagttgttcgctcatctgatgcctggccgggaaaacacgctggtgctgttcgcccgtgatggtaacggcgaggtggatccggcgactggcacccagcacggcgctatcgagatcgcccagctgattcctcctagcctgcgccaggcgttaactagggtcattgtcggtgaggtgcgcggcaatgaggcttcggccatgttccaggctatgcagtcggggactggcactatgagcagtatccactccccgcgagcctctgaggtgccgtcccggctagcccaaatgatttcgatgggcccggtctacgatctggatcaggccatgctgcagatcggtcattcgatcgactacatcgtctttgttcgtaagcgtgacctgcctgatgggagccggctgcgatttgttgagcagatccgttcagtctcgcctggtgattcgacaactcccagtcttggcgaggtgtacacggctgactcgtggacaggccagccgcttacgccactcatgcctggttcggccgccgacgagctgtctcacttcgcccgagacctggattactgcgaggcccactcatgaacactcccgcactaaccagcgccctcatcgtgaccgggttggggctgatcctggccatcgacgggctggtcccggcgccgcctcgacctggtgccccgctgagcccggcccagaggtgggctcggctcacccaccgtcccacaggagcggccgggcgtcgccgggatttgcgttgggggttggctgttctcgtcggcgtcgtgctgtttgtgctcaccgggtgggtggctgcgctggcgttgggccccatcattgtgttgttggcccccaccctgctgggggcggccccaccgaccgatattccgctgatggaggcgttggatcggtgggtgcgtcaggtcgctgcggtgctgccacaggggcgagacatcatcacagcggtgcggatctcacggccgcgggccccgaagctgatcgccgggtcggtggatcaactggtgtcccggttggatggccgtatggagccgagggaggcgttccagcggatggccgacgagctggactcggctgaggctgacgcggtgctggcctcactagcgttggcggccactcatccgcggggagcctcgacaacgttgaaggctattgctggcaacatccaacagcggttgaaagtgctgcggcaggtggaggctgagcggtctaagccgcgtaactcggtgcgccagatcacactggtcacgatcgccatgttcggggggctgctcgtgatcggacggtcgtttctggccccgctggcgacccctcccggtcaggtgctggtggccgtggcggtggtcatgtatgtcatcgcactagtgcagatgtatcggatggcgcggccccgtcgacgcacccggatcatggtcaggaggacccgatgaccattactgctttgtccctgctggccggggccatcgtcactgtcggactgctggtcatcgtggcagcgttccgcccagccccaggccctgacctggttgccgctctggaggtggtgtcgggtcgcacctcaagcgtcgccgagaacgtcgaccagacccggatcgggcggataggtcgcagcgtgacccgcacattccatgtgtcggtgtccccggccatgcgggccgcactgcgactccaaggcacgacccccgaagcgttctacggtcgacgcctgatctgcgcactgatcggggcgatcctgccgtggctgctcaacgcggtagccatcgcggtaggggcgaattccccgaacctactcatcccttcggcgctgtgtgtggcgttagctggcgctggatggatgctgccggcagcacggttgaaggctgcggccgggcccaccaacgatgactcgttcgaagcgctgctggtattcatcgatttggtcgtgctggaacggctcgccaacgaaacctccgtcgacgcgctcaccaatgcggcaaacatgtcggactcgccgctattcgtccagatccgtcaagtcctcaaccgtgcctccctggaaaacgtcgacccgtggaacgggctagaccggctagccgaggacatcaaactgcccgaactcaccgatgtggtctccatcgcccgcctccaaaacgaaggcgcctccctcgtcgacagtttccgggcccgagtcgccgagttgcgcgacgcctacctgctgcgcctgcaacaagaatccaccgccatcacccagcggcttggtttgtggacgatcctgcaagccggctcggtcatgctcatcttgctgggggcggccgccctcacactcatcacagccggataaaccgacatcgtgtcgagcccccatatgggccgcgaacctttcataatgatgcctgtaagcaccacaatattgatcacaacctaacaatgaaggagaaatcatgatgaccgatctcgacctggctaaaaaacagatcacctggctggcggcgcacctgcgttcccggatcgttgacgagcgtggcggtggtagctctaccgtggagacactgatttggattggtgtcatcgtggcgctggtgattggtgtgggcgtcggggtgacggcctatatcaggtcgaagatgcctcactgacgacgatgcgtagcaggttcacaactgatcagcgtggcggtggtagcgcgtcggtggggatgctcctgctgatgcctgcgatcatgctgctggcattcggtgggatcgaggtcgggatgtggtgtcacgcccatcagtcgaccatcgcggcagcccaaagcgccgcggaggctcagcgtgtcgtccatccggtcccggggtcggcacaggaggcagcctcgcagatcactagtcatggcggggtgcgtgatacccggatatcggtcagtgatgacggggccactgtcacggtgaccgtctcaggtcgggccccatcgatgctggggctgcatcttccggctgtgtcgtcgacagcgtcgatgcccaaggagcgcctgtcgtgaggcgaagtgagcgcggtggagcaagtctaagcgtcgaggtgctcatgtgggcgccgatcgcgctggtgatcatcgggtttgttgtgggtatcggccggatgtcgatggcccaggacgcggtgaatggcgcggcgggtgctgcggcccgtgcggcgtcgttggagcgtgatggacagtcggctcagtctgcggcgcagcaggcggcgtcggcgaacctgtcgtccggtgggctggcatgtgcgccgagtgtgagcgtggacacgtcagtgtttgcccgtcctgccgggcaggcgggcacggttcacgccacggtcacgtgtgtcacctcgctgggtcttgggttcgggtcccggacggtgcacgcaacggggtctgccccggtagacacctatcgggaaaggagaggctgagatggcccgtgatgagcgtggtggcggctcggtgtcggtgtggatgctgctcatggtgccggtgattctggtcatggccggcctggtttttgacgggtcccgtcagatatcggcaacccaggcggcccaggacgcggcggttgcggcatcccgcgccggaactgatgcggcagcgacaccgcagcttgctggccacgacggggcggccgtagcagtccaagcggcccgccaggcactatctgctgccggggtggacgggtcggtgcaggaggacgggtcgaccatcacggtgaccacgtctcaaagtcggccgacagtgttcctgtcagcgatcggaatcagccaggtaagggggcatgggcaggcccatgctcagcttgtgggaccgggagaacgcccatgacagtgatacgtcgtatcggtgccctggtggcactgctggtggtgatagccggcttaccggccgggctcgtggccgcaggcgccccgctagtaccctcgggcctgtcatgggcccatgtgcggcatctgttggttaccccagacatgaccgggtcggtgctggtgtggctggtcagcctcatcggctggatcgggtgggcatggttcgccctggccgtcgcagccgaagcggtgacgatgctctcagggcagcggctgcactggcacatgcccggccctcgcctagtgcgccgagtggcagccggtcttctcattgccgcgttcgcggccgcaccggcagccacaagcacggctcacgccgccgaggccacccatgtggcggtcgccgcccaggctggaccggcacacgcggcccccgcccaggacagccccgccaccacctctcaggccccggacgcctccaccactccgaaaatctggaagacctacacggtgcgggccaacgactacctgtggaagatcgccgagcactactacggtga

SEQ ID NO: 218 - DNA, 2098 bp, Propionibacterium acnes
  source 1..2098: mol_type = genomic DNA
ttggtattggtaggcgatggtgtcaccggttttgttgcggatgacgtcgaagccttcgatgtcggaggggatgtcgtcggcgtcgtagacgacggtggtggtgacggggttggaggccgacatttggccgatggtcacgcgcagcatgtttttcaacgcggaggtgaggattgtcgtggcggtggggtttttgtctgcccagcgtttctcggcgatgtcgatcatgtcttggatggttttgacccatcctcggatgggatcgactttggtcagtttgatcccttcgaggaactcgatgggctgggtgatgggcccatccggtccggcttcggtgtcccagccttcgtcgatggctagtttcagttcggcggtatcgacccatgtttcgtgggtggtgccgggcacgttgggccaaaaccatcctgctcgtcctttggtgcgtttgaccggtagtaggccgatgtcgtcccaccaggatggcacggtgaagcggatgtggtagcgggccgggtgccaggggttgttggtgaacaggtcgcgggcttcggtggcgctgagcagagtggcgggtgcggcaccgatctctccggtcactgatccggcatacatgaatcggccgtcgatgtacacgaagttagggatagggccggcaggcacggtggggcgccagcccttttcgcggtcctcggggttgccgtcgtcgacgcatagttcgtagcggtgctgaggggaggtgtgttggatgagtgcgcccagttcggggtccatcggctccatgcgataggactcgggggtccgtagcttccagaggttgattccttctgctccggggcggtccatgagggcccagtcgcggtcgattctggtggcgatgatgtgggtcagttctcgccatgcccagcgggcctggattggggtgagggtctggccagggaaccattcatcagcgaccagaatgtcgaggttgcggtcggtttctttgtgggtgaaccggcctcgggcgggccgcccggacagcatgaacaggccccgcacgtgccagtcctggttgaactcgcgggtgtgagcgggggtgtcaggcagcagccaggattgaggctggtcggggatgttaccgcagacgatcaggcgtcgggcgttgtggtgtagcgcggttgttagcaggtctgacagggtcgcgtgcttggtgcgtcgtccccccagcactggcaggatctcgtttccggccgcgtcgactccccgggcggtgtcgatgtctagccacactgtttcggggtcggggggccgatgtggggcgggacggcgctgctcctggtcgtctctcatggtttcctcctttgggccagggagcggccggcgtcgagggcgttcatgcgctcgcgttgttcttcgcgtagttggtagacccggcctcgtgacactcctgctgcctcggcgatggtggtggccggcaggtggccgatggcggcagcgtcggcaaggacgtcacgccaggccaggtcaatggttcccagctgggctagagcttcgtcgcggcggcgggtggcatcagccactacggaggcccaccctgtggggtggatggtcttgacgacgattcggttgtggcggatggggccccatgcatcagcggggacttgccagccgtgattggcggcggactcggtgatcttgaggcgtcgctcaggtgcgcgggtgcgggcagtgacgtcggtgttccaggtctggactggtacccacgtcccctctcggatgcgttcgatgacgcacgtggtgacctcgtcggtgactgtgatgaccagacgataatctttcccgtctggggtggttcggtagctgggcatgtcaccctcccctatctgtcaaatgagctagacacagtgtctatttaatttgacgcaaagtcaagtgtgctagacgcctttgtgtggatccgcccgcccagacaggcactcacgtctcatgacccgccgcgacgtcttaacgaaaccaaaccgcttatagaaccgctccgcagcgggcccggagggcttcagttcgagggtgagaccttgctggtcggcccattggcagacttgtgtgaggatctgtgagccgt

SEQ ID NO: 219 - DNA, 1726 bp, Propionibacterium acnes
  source 1..1726: mol_type = genomic DNA
cctcgctgactacctgcccgcctgatcccaccccaatccactcgggcgcctgtcagtgccccctcttctgggtggtggtccggggcgtcaccgccccggaccagttgggtagtcatctcagttgaaataagcgattagtgatacgcccctcctgctttccggtgctgtcatgagcgtctgacaacagcgacacctcggggcagccgacggacagtcctctggctgccgctctgatcccatgcccacggcacgaaggtgtcggacagctcggtctcgtcatgtgcccaaatagcgtcgtgggcctgtcgccaagcttctcgggagccccacacgggcacgaccgggccacaccggtgtcctggtctccagtgtcgcgacactgtcgatttcggtacgtgcaatgcggcggcggtttgacggatcgacatcccagactcccgcgcgtcccagatcgccatgtggagagtatttgcctccagtgcggccgccacacttgcacgctctcgcgcacgctcgaatgcccgcctagtgctctcaaatgtcgtcacgacgcctccccctgaaaatactcagggtgtcccacggtgggacaccctgagtatttcataccccaactcgcctcaccacacgtcgacctcgacaccgactagccgacccctatcggcgacattgccatactgctgacccgcctggtcctctagccacgacaacgcatcccgaaacagcccgacgtcttccaaagctaaaccgcagtcgtagccgcccttgtcccccaaccgcacaatctggcgctcccgacggccaccttcatcgacttcgatccatagtttcgcgtgcatccgctggccgcggccttctgacaggatctcggtgagcagatcggaggctcgcatcctcgttaccgcgagggaattggagtgtgtgggaggaacgacgatgggggaggttggtgacctcgtgacgcagcaggttgcgcttgtgcatctgccgttcgaggcgctcgggctgactcgttgacggggttgtgccgtggcgccgcttcctcggcggggtctcgatccgttgctcttccggcggttcggcgtcaggttgtggtgcgcgatctcccctaggacgggggggctcaccacctatatccgagggacgatgagacggccttccacgcttgctgcgcactttcgcagcccgccccttgcggtcacatcgacgcggcggcggggtaacctcctcgccccgctccaactgtgttaacgccgccaccaggttggtgcccggtttcagcccttttagcacgaaccgcaccaggcgggggtctcggccgattcgtcgggcaatctcggcttggctccacccctcggccaacagggtgcgcaccaagtcttgggcccggttatcacgctcagtcactggtcgccccctcggggagtcctgcctgctcggcctgctctgatagagcagcccgctccgatccggtctgaggcgctttcaggggcccgggcaagacacctttgacacgcagccgcccgtccttgccgtcatcgccgcccccctgggccacagggagcgcccaggggggcacgttgctggtgtagatggcgtcgccgtggatggccagcagggtgcgggagttcatgcgtagtgctcctcccttggttgtggcgttttttccggtggtggggtcggcgatgggtgtgttgagggtgcgtacgcgggacagggcccagat

SEQ ID NO: 220 - DNA, 619 bp, Propionibacterium acnes
  source 1..619: mol_type = genomic DNA
ggcggtggctcgaccaggtcgccgacaaccccggcttcctcgacacccttatcgaggccgcccgcatcaccgatggatggcatcacgcgacgcctccgcacattcaggccccttaccggacccttcatcagtgaacggaggtacaacgacatgaccagcgacattgacattgaccggacccacaaacccgacgaccgcgccgaggctcctctttaccggtcctgggccaggagactcgtgcacgtctccgggatgccctggcgtatcgtcgccgccttggccggggtctcccccacctccatgcaccggcttctattcggccgcaacggtcgacccgtggaatggatcggcatcaatgatgctcgcgccctgatggatatcggcatcgatgatctcgcctcagcgtccaccgaccgtatcccggcccgcgaatcccgcgagctgttggtagccctgcacaccctcggctggaccaacgcgcacttgagccgctggctgaccagttccgacctcgacctggccaccacccccaaggccctctacgtcactcgactatccgccgcccgcatccaggccacctacgacatgctcatcagccagcccgtccgccgctgcggcc

SEQ ID NO: 221 - DNA, 8774 bp, Propionibacterium acnes
  source 1..8774: mol_type = genomic DNA
gaaggttccctagacccggccgatgtgcggagggatttcagtgttttatcgaggtgaccagccagccggtctgcgctgcgggttcaggtaccagggtcagatgcaccacggtgtggtcggctaggggcacggcgaccaggggcccgtcggcgctcgccccggtgagggtgggagttccggccacggtggtggcgggaatctggttgggtttcgcggccatcagggagcccatgagggtcggggcggcgatctggacgagggcgactttgcgggcggcgggatcgcgggtcaaccagccgcgggtgaaggtgagcgcagccgacgtgatatcggggctcagcggggctggtgtggcggcggggtgggccgttgaggagggccatacgcgcggtagcgctggcgacatcgagcgggtcggagtggggtcaggtgtggggcttagggtccgatgtggcgatggggctaccgccccggtggtgggagacgagactggttgggggtggtgttgagggcgtgggatcagggtgaaggcagccaaactggccgggatgaggatgacggccgcgccgacacttcggagcgaggtcatgtgacgatccttcggtagctcgacgggttgccgtagatcttttccacgttgatgccactatgtgggttgtcggcgctaaccatttggcctccaccgatgtagacggccacgtggtgggcagggcttccccagaggatgaggtcgccgactttgagctggtcacgggccacagcagtgccgactttctgctggtcggcggcggtgcggggaaggctaatgccgatacgccggtacagcgccgaggtcaggcctgagcagtcgtagccgccatcggctttgccgttaccaccccacacgtaggcgtaggagttgttgtcggcgatcgatttggcccatgccacggcttcggccaggttcttcgacacaccggtctcgttagcggccccggtggcacagttgtttgacaggtgccctgtagtagtggatcccactatttgtttggccatggtttcccatttggcgtaggcatcgggcagggctgagccttgcactgcctgagctgcctgcgtcagcggcatcttctgccagtcagcgatgtcgactaaaccgggaatgtggaatccagggccgccggccgatccggggccagcgtaggtgatggtgtggcctttcaagaacgcctcggtggcgtaggcatcattgttgacctgatccagagtcccgtaccagcccggcaggatgcgctgctgaaaggggccggcgtcaccgtcaccgttagccttcgctgaggtagggtcggccccaagatctgattcttgtttggcggtcatgatagcgatgaccgctgcctgggtaggcagtttgtcacgctggaccacagtgacgatggtggtcacgagctgcttctgcctggccgtgaggcctccggcacccacagtgcctccggtgacggtacccacgcaagcatccccgccgacactgccaccgccgccgccagagttgtcgtcgagggccccagagcctactgacagcagcggcacaatgatcacggtcgctggcaagaccgccaggcccgccagcatcagcactgctgcactcaccacggcgatcacgtgagatgctttcaacgctgcccacctctcgctggtttgagggggcgacgcctgctggtacgcacaggcttggttgatccagtccgccgttgattggcaggcctgggtttgatcggcttgctgggacccggtttgggctccggagtcttaggctccggcttcacatgcctaggcacttcggctgcggtgggaggagtcagcacgtggcgtaccggcttggtgaccttctgggcacccgaaacaaccggcttagacaccaccttggcacctttgaccaccggtgcggctgccttcgcgccggccttcttgactgcacgatgcgctttgatagccccggcctcggcccggccaaccctactagcagtagcatcgagggctctgtggcccgtcgttgccctcaccggtgcatccttgccctggcgggtctgcttcgcgatcgccgacatgccgcctcgcaatgccgaaacatgattgtgggcgtgggcgatcgccgacatgccggccgtcgcgatttttgactggccctgcggggcccctgccccagcacgaatctgccggtaagccgccgacgtgccacgagcacccgccgccattcgcgccaccttcgcagccctagtcactcccgtcgacacgccacccgtggctaccgcagcagcacccgagaccacagtcgaggccatccgccttcgacccgatccggtgagcttgcgaccaccactgcgcaccatccggcgagcaccccgcccagcccactggccgatcaccgagcccctttcggaacgcttgctgcgcatccaatcgttgatcttgtccctcagccccttctcgcccttgtgacgacgccacatggacatcaagaacccgataatccccacgagctcgagcatgttgacaaccatgaccttgatggcgacatcaccgtcagaggcgaaaaccgacttgatgatgagcatgaccacacccaacatcaccatcgacccgacaatgccgatcatcgagtacaagatcgaacacagatcccggatgagcggatctgtgcggccagggatagcccgcaacacgttgagcatcgacataaacgccgaccacaccaacttgcacacgtagaaccagcacatgcccgcgaacaccagcaggaccacagccaaacccgccaccgtcgacgagtaaaagaagaaacccaccaaccacgaaccatccgcaatatcgccggcgtaatccgacaacccctcatcacagtcaccaaggtcgtcgcgagcatccgagacgtcatcgtaagggccacccttgagcacctcgatgtacttgtcgtggcacttcgcatcaataatccggccatagttgagctgctgatgaaccggcgccacgaacgagtccacaatgatcgccgacagcttcggatccttcgagtctcccgtcgaggtcatgtcatcaggaatctcgacctcaccagcggtcgccgtcgcaggatcaaccgaactagtaatcatccgagacagcgccacaccgaactgctgggtgcgagccaacggagtagccaacgtcgtcgtatcgcctgcgaacttcgccaccggggccgccaagaaacccaacgccagcgccgcagcaatcgccgcacgcgcacccgtagcccacgccccagccgtacgtcccctcatcatcttgacgaccacgcccacaccggcgcacgtcgtcagcaacgtcaacaccgttccaccccagctgtccgctcccagcggggccaaaaccttgtcgtggatatcgttctgcaaccccaccagcgggccggtaatccacccgacccagctcatcgccacggtccagtccaacaaccggcacagcaacgcaatgaccatcaggtacgtgttccaacacataccaataatggaggcccacatagccttcaacggggccgtaacgccaccatcgtccatcgacatctggtactgaaacaagtgaataccgttggagtcagtcacattgaaaccgtcacccatccagcccagccccgggcccgacgccatagcaggcacactgctcagcgccaccaccaaaaccagcgtggtgacgatgatacggaaccaccgctccccggccccggggcggcgtggatgacggctcacgctgtctcccggtcgtgctcgggcgggttggagctggcggcttcgcggtggggagcgtaggcaggtctcagtagtcgaatttcaccgacgttgccgtgctgatcggcgtacaggccacaaccggggcctccggggttgagggcaatcttgaccaggtcagcgaactcttcaggggacgttttagggtccacgcccaggaactcgacacctttctgggcgaggttgatgttgtcgcacagcaacacgatgcgatgctgaatgaggttgcggacggtctcgttggggtaatcggcctcggggtcgtgggagccagtaatgagccaggcgttggctcggcgggattcgcgcacgtactcatcgatggcgtgggaggcttccggcgaggacgacatatggtggaactcgtcaacgatgaaagcggcgtcgcgggcccggtcgctgaagcacaccaggcgagccagacgggcaataagcgcgtagagggctcggccaaacaccttgtgcgggggcagctgccgaaacaaatgttctgacagcatctcctcggcgttaggaagagcgatgccacaagtgccaatgatgaggatgtcggcactcaggtcggcgggaggaaggtccgggtcaaagatggccgaagctagggaggccgagttctcgatgtcagcgaacacggcaatcctgtcagcgatcgcggtggcctcgggaaggtcgcactcctcggccaggtggcgggccaaacgcccacacgaggtgatctggtggtcacgcatgtaggccggtttgaggaccttggccagcgtggtcccggccacaccgatggtctccaagttaagcaaggtcagcaagaacgactgggcgacctgcccggccatctccgggggaaggatgcgcagcgggtccagcgacagcttggggtgggccgtgtcgacgatctggcgtctaaccccgtcgatagagttgacaaaggttacccactcccgctcatcggagttgtcggtggcaataatgcgcccgccccgggccgcgatggctgcgcacagccgcttctcggccatcgtcttgcccgcgcccatcttgccgatgaacgccaccgtgttgcctttctgatcctgagtgtcggcatgcaaatcgaggtaggccagcgactgcaacggggagcctgtgaccacagccaacgggatgccggtggtacggcccaaccggtactcaaccaccgggatagatgcggcgaacgcggaggcgtgagtcagctgacggtaggcgttaagcgaggaggagaaccggccaccgggccgggcagcccacagcaagtcctcctgacggcccacgggacgcacccacgtgaagtcaccgaacaccggatcattgacgaacgctcctgccagctcctcggtggtctcaaagtcaggagacgagacagtgacggtgataagagcctggatctcgacctcacgctcatcggcggccagctcggcgttgtagtcgacgagcacctgagcggaatgctcgatagacatgagggtcgaagcctgggtcatctcaccgccctcaacattgtcgagctgatcgacggtttggcggatggcccgctgatttttctgcatcgcagcgtgacgggtccgggccactccccggatcgccacgtcgaccggcacgccagtgtcgtcgatacggcccaagaactcgtaggcaggccacgtcatcgtgcggggcaccttacccagcacgatatgggactggtagacggtctcgccggtgtcggcaccgattttgaggacgcgacgattccacgcctgagccgtccgggacatgtgggagactcgcttgtcatcctcgctggccagcaggtcggaggtcgcggcctcatcgatgaccaactcccccagcgcggcacgtccaacctcatccatgagggcgattccctcgccaggggcatcatcacgcaaccgggtcgggtggcctgacaggtgctgccgaagccagatctgttcatcaacggtgaccgggcggggttggaacgctgccggcagtttcgcaccgaattccttagcctgacggagggcccactcccgtgcgacacggccaggagcggtggtcatgagtccggcgacttcggtgattttgttgagggcggcggtccaggcggtgtgggtgcgtattttctggtcttggttgagtttgatcgataggaaccacacgcgccggcctagggatgcggtttcaggctggtcgagggtggcgtcgatttcgtcggcccacacggggtgttcgctcaggtcgaggccggcggccatggcgtcgacgatttctgtggggtcggtccaggtgagggccccgttgaggcagaactcgtggcgggcgaggtggcggaataggtcgcggtgagctgcggcgacggtgagggaggcgttctcggtgacgggtcgctggaggggagtaagtcgccaagtggcccagatgtcgccggtggaggtccagacgaggttgtcgaagaggaaccgttcggggatggacatcatgactccttttcggcggcggcgaggaaggcttccaggccgctgcggcgtacagcgttcccagtagggtgcaggggttttctgggggtgggttcagatttcgaatgtgggaagagtttgtggatggtatcggtgtcctcggcgagggcttggtcgagcaggcaggtggccggggtgtcggtcatctcgtccagctcgtcgatcatctcgtcgaggaggttgggggtggtggatgcggcccacacaggtgggatagccggtgcgggtcgaggcggtgtggggaggcggagtttggtttggccccagaggggtgtgtgggtcatgccggcgggagtggtggcggcgtgagtggtcacacgccaccagcccgacagccatgccagaggtgaccaggtccagtcgatgcgaccaacaacgaactgggcgagccatccggcagccagcgcgaaaatgaaaccgcggatggtcatgcccccgtcgataattttgaagcccatcatcgcggcaggaactacaccgccgacagcgagcacctgatagatcgtgtagggcccgccaggaatccttcgacctgaggaatccttgccgataatgcggggctgctggcgggcctcggtgtgccactgaatatccacgatcagctcttgcccaatccttgcatcatctgtccgaagaattggatcgcgttaccttcgataagccagtgcgccataccacacacaaacagcatggagacgatcttggccaggctcataccgtgtttgaagatgttgaacgcggcaatgcccacgactacgaccatggcgacggctcgcaccgcggactgaccttcacctgccttgatcgtcgtccattcgaagaggttctgcgattccagtggcagcaggaggaattgatcgagcatgagaggttttcctttcaggaagccgaccgggatggtcccggtactgacgggctggacggcacgggtgtgccggccaggggcagaaggcgtgacggctggtcgagggcggcaacctcccagcgtcctgcacgactgacaagagtcaggccgtactggctagtccgggtagtggattcgtcaccggtgggctggcatgtcacggtcaccgtgacggtaatcttctgccgatctgagggggtggggacctcgtcaggccccaccacatgagtggttttcaccgatacacacggggctgggtcaaccgcggtgaaagcggtccccgggctactccatctcgacaggtcagtattcccggtcagcatggcggccaagaaacccgaagaggtctgggcagccgggtcagcaggacgaatctccgaggagtccacgtcgggggctgaggccggtgcaggcatggggatctgcccaggtagacgcaaggcgatggccttgccgccggcatcgacgtggaccggaaccgaccaggcctgtccgctcccggattggccgcccatggtgaccacggtgacctgccacaggctcggatcagacggggagacggtagcgtcataggcggtgacggtggtgggcgctggaccaggtttgcggggcatgcgcgcatcggtgatcttggccgccaccaggtgttccagattgtccaagtgcccggagtcagaggtcagcagaagagtagtcacctcgaccgcggtggctgaggcgatctgagctgtgcggcggtcgtgatgggtggtgtcagtgctgacagctgtggtgggagcggatgccggggccgccgaacggaccagggcaacggggccgcatgcgactccgcacagcacgagggcaaggaagcctttggtggccatcgatccggtgtggggccagggacccacgttttcctgtgcctgttttttcttggccgaccaacggcgggacttagggttagcggatgcaccttctggggtgcatgctcgtctcaatcgcatcggtcacctccttcactggatgaagggaccaaggaggtgaccgatgtgcggtcgaacccgaaaaagttcaaacttttttctgggtctgcctcaagtacgacagaaggcctgcatcatcacggcgttgtggtagcagatcttgcgtcagcgcaaatgcatgggcctcgtaggagtagctcttaggtaggtcccggtggttgcggccagggcgagggtgtcgggtatgtgtagcgctagtcccgggttcgtggtgtgagggcttttgggtgctgacatgcactacccattgctagacgctgtgctgtggcatggctggacgtctagcagacgggttgacatcacctttaggctggcagcgcccgaggccgcaggccagaggaagcggacagcctaacgattgacgtccccctctcctttccccaacctcctggagtcgatgacccggagatagatcgatgtctatgcatcggtgcatcgatatacctatgtatctgtctgtggtttttagaggccactcccgtcgccccgggccgctcagcgataccgcaaggctgtgtgggatcag

SEQ ID NO: 222 - DNA, 8231 bp, Propionibacterium acnes
  source 1..8231: mol_type = genomic DNA
gggatgaggatgacggccgcgccgacacttcggagcgaggtcatgtgacgatccttcggtagctcgacgggttgccgtagatcttttccacgttgatgccgctgtgggggttgtcggcgctaaccatttggcctccaccgatgtagacggccacgtggtgggcagggcttccccagaggatgaggtcgccgactttgagctggtcacgggccaccgcggtgccgacgtgctgttgttcggcggcggtgcggggaaggctaatgccgatacgccggtacagcgccgaggtcaggcctgagcagtcgtagccgccatcggctttgccgttgccaccccacacgtaggcgtaggagttgttgtcggcgatcgatttggcccatgccacggcttcggccaggttcttcgacacaccggtctcgttagcggccccggtggcacagttgtttgacaggtgccctgtagtagtggatcccactatttgtttggccatggtttcccatttggcgtaggcatcgggcagggctgagccttgcactgcctgagctgcctgcgtcagcggcatcttctgccagtcagcgatgtcgactaaaccgggaatgtggaatccagggccgccggccgatccggggccagcgtaggtgatggtgtggcctttcaagaacgcctcggtggcgtaggcatcattgttgacctgatccagagtcccgtaccagcccggcaggatgcgctgctgaaaggggccggcgtcaccgtcaccgttagccttcgctgaggtagggtcggccccaagatctgattcttgtttggcggtcatgatagcgatgaccgctgcctgggtaggcagtttgtcacgctggaccacagtgacgatggtggtcacgagctgcttctgcctggccgtgaggcctccggcacccacagtgcctccggtgacggtacccacgcaagcatccccgccgacactgccaccgccgccgccagagttgtcgtcgagggccccagagcctactgacagcagcggcacaatgatcacggtcgcgggcaagaccgccaggcccgccagcatcagcactgctgcactcaccacggcgatcacgtgagatgctttcaacgctgcccacctctcgctggtttgagggggcgacgcctgctggtacgcacaggcttggttgatccagtccgccgttgattggcaggcctgggtttgatcggcttgctgggacccggtttgggctccggagtcttaggctccggcttcacatgcctaggcacttcggctgcggtgggaggagtcagcacgtggcgtaccggcttggtgaccttctgggcacccgaaacaaccggcttagacaccaccttggcacctttgaccaccggtgcggctgccttcgcgccggccttcttgactgcacgatgcgctttgatagccccggcctcggcccggccaaccctactagcagtagcatcgagggctctgtggcccgtcgttgccctcaccggtgcatccttgccctggcgggtctgcttagcgatcgccgacatgccgcctcgcaatgccgaaacatgattgtgggcgtgggcgatcgccgacataccggccgtcgcgatttttgactggccctgcggggcccctgccccagcacgaatctgccggtaagccgccgacgtgccacgagcacccgccgccattcgcgccaccttcgcagccctagtcactcccgtcgacacgccacccgtggctaccgcagcagcacccgagaccacagtcgaggccatccgccttcgacccaatccggtgagcttgcgaccaccgctgcgcaccatccggcgagcaccccgcccagcccactggccgatcaccgagcccctttcggaacgcttgctgcgcatccaatcgttgatcttgtccctcagccccttctcgcccttgtgacgacgccacatggacatcaagaacccgataatccccacgagctcgagcatgttgacaaccatgaccttgatggcgacatcaccgtcagaggcgaaaaccgacttgatgatgagcatgaccacacccaacatcaccatcgacccgacaatgccgatcatcgagtacaagatcgaacacagatcccggatgagcggatctgtgcggccagggatagcccgcaacacgttgagcatcgacatgaacgccgaccacaccaacttgcacacgtagaaccagcacatgcccgcgaacaccagcaggaccacagccaaacccgccaccgtcgacgagtaaaagaagaaccccaccaaccacgaaccatccgcaatatcgccggcgtaatccgacaacccctcatcacagtcaccaaggtcgtcgcgagcatccgagacgtcatcgtaagggccacccttgagcacctcgatgtacttgtcgtggcacttcgcatcaataatccggccatagttgagctgctgatgaaccggcgccacgaacgagtccacaatgatcgccgacagcttcggatccttcgagtctcccgtcgaggtcatgtcatcaggaatctcgacctcaccagcggtcgccgtcgcaggatcaaccgaactggtaatcatccgagacagcgccacaccgaactgctgggtgcgagccagcggagtagccaacgtcgtcgtatcgcctgcgaacttcgccaccggggccgccaagaaacccaacgccagcgccgcagcaatcgccgcacgcgcccccgtagcccacgcccctgccgtacgtcccctcatcatcttgacgaccacgcccacaccggcgcacgtcgtcagcaacgtcaacaccgttccaccccagctgtccgctcccagcggggccaaaaccttgtcgtggatgtcgttctgtaaccccaccagcggtccggtaatccacccgacccagctcatcgccacggtccagtccaacaaccggcacaacagggcaatgaccatcaggtacgtgttccaacacatgccaataatggaggcccacatagccttcagcggggccgtaacgccaccatcgtccatcgacatctggtactgaaacaagtgaataccgttggagtcagtcacattgaaaccgtcacccatccagcccagccccgggcccgatgccatggcaggcacactgctcagcgccaccaccaaaaccagcgtggtgacgatgatacggaaccgccgctccccggccccggggcggcgtggatgacggctcacgctgtctcctggtcgtgctcgggcgggttggagctggcggcttcgcggtggggagcgtaggcaggtctcagtagtcgaatttcaccgacgttgccgtgttggtcggcgtacaggccacaaccggggcctccggggttgagggcaatcttgaccaggtcagcgaactcttcaggggacgtcttagggtccacgcccaggaactcgacacctttctgggcgaggttgatgttgtcgcacagcaacacgatgcgatgctgaatgaggttgcggacggtctcgttggggtaatcggcctcggggtcgtgggagccggtgataagccaggcattggctcggcgggattcgcgcacgtactcgtcaatggcgtgggaggcttccggcgaggacgacatgtgatgaaactcgtcaacaatgaaagcggcgtcgcgggcccggtcgctgaagcacaccaggcgagccagacgggcaataagcgcgtagagggctcgaccaaacaccttgtgcgggggcagctgccgaaacaaatgttctgacagcatctcctcggcgttaggaagagcgatgccacaagtgccaatgatgaggatgtcggcactcaggtcggcgggaggaaggtccgggtcaaagatggccgaagctagggaggccgagttctcgatgtcagcgaacacggcaatcctgtcagcgatcgcggtggcctcgggaaggtcgcactcctcggccaggtggcgggccaaacgcccacacgaggtgatctggtggtcacgcatgtaggccggtttgaggaccttggccagcgtggtcccggccacaccgatggtctccaagttaagcaaggtcagcaagaacgactgggcgacctgcccggccatctccgggggaaggatgcgcagcgggtccagcgacagcttggggtgggccgtgtcgacgatctggcgtctaaccccgtcgatagagttgacaaaggttacccactcccgctcatcggagttgtcggtggcaataatgcgcccgccccgggccgcgatggctgcgcacagccgcttctcggccatcgtcttgcccgcgcccatcttgccgatgaacgccaccgtgttgcctttctgatcctgagtgtcggcatgcaaatcgaggtaggccagcgactgcaacggggagcctgtgaccacagccaacgggatgccggtggtacggcccaaccggtactcaaccaccgggatagatgcggcgaacgcggaggcgtgagtcagctgacggtaggcgttaagcgaggaggagaaccggccaccgggccgggcagcccacagcaagtcctcctgacggcccacgggacgcacccacgtgaagtcaccgaacaccggatcattgacgaacgctcctgccagctcctcggtggtctcaaagtcaggagacgagacagtgacggtgataagagcctggatctcgacctcacgctcatcggcggccagctcggcgttgtagtcgacgagcacctgagcggaatgctcgatagacatgagggtcgaagcctgggtcatctcaccgccctcaacattgtcgagctgatcgaccgtttgacggatagcccgctgatttttctgcatcgcagcgtgacgggtccgggccactccccggatcgccacgtcgaccggcacgccagtgtcgtcgatacggcccaaaaactcgtaggcaggccacgtcatcgtgcggggcaccttacccagcacgatatgggactggtagacggtctcgccggtgtcggcaccgattttgaggacgcgacgattccacgcctgagccgtccgggacatgtgggagactcgcttgtcatcctcgctggccagcaggtcggaggtcgcggcctcatcgatgaccaactcccccagcgcggcacgtccaacctcatccatgagggcgattccctcgccaggggcatcatcacgcaaccgggtcgggtggcctgacaggtgctgccgaagccagatctgttcatcaacggtgaccgggcggggttggaacgctgccggcagtttcgcaccgaattccttagcctgacggagggcccactcccgtgcgacacggccaggagcggtggtcatgagtccggcggcttcggtgattttgttgagggcggcggtccaggcggtgtgggtgcgtattttctggtcttggttgagtttgatcgataggaaccacacgcgccggcctagggattcggtttcaggctggtcgagggtggcgtcgatttcgtcggcccacacggggtgttcgctcaggtcaaggccggcggccatggcgtcgacgatttctgtggggtcggtccaggtgagggctccgttgaggcagaactcgtggcgggcgaggtggcggaataggtcgcggtgagctgcggcgacggtgagggaggcgttctcggtgacgggtcgctggaggggagtgagtcgccaggtggcccagatgtcgccggtggaggtccagacgaggttgtcgaagaggaaccgttcggggatggacatcatgactccttttcggcggcggcgaggaaggcttccaggccgctgcggcgtacagcgttcccggtagggtgcaggggttttctgggggtgggttcagatttcgaatgtgggaagagtttgtggatggtatcggtgtcctcggcgagggcttggtcgagcaggcaggtggccggggtgtcggtagtctcgtccagctcgtcgatcatctcgtcgaggaggttgggggtggtggatgcggcccacacaggtgggatagccggtgcgggtcgaggcggtgtggggaggcggagtttggtttggccccagaggggtgtgtgggtcatgccggcgggagtggtggcggcgtgagtggtcacacgccaccagcccgacagccatgccagaggtgaccaggtccagtcgatgcgaccaacaacgaactgggcgagccatccggcagccagcgcgaaaatgaaaccgcggatggtcatgcccccgtcgataattttgaagcccatcatcgcggcaggaactacgccgccgacagcgagcacctgatagatcgtgtagggcccgccaggaatccttcgacctgaggaatccttaccgataatgcggggctgctggcgggcctcggtgtgccactgaatatccacgatcagctcttgcccaatccttgcatcatctgtccgaagaattggatcgcgttaccttcgataagccagtgcgccataccacacacaaacagcatggagacgatcttggccaggctcataccgtgtttgaagatgttgaacgcggcaatgcccacgactacgaccatggcgacggctcgcaccgcggactgaccttcacctgccttgatcgtcgtccattcgaagaggttctgcgattccagtggcagcaggaggaattgatcgagcatgagaggttttcctttcaggaagccgaccgggatggtcccggtactgacgggctggacggcacgggtgtgccggccaggggcagaaggcgtgacggctggtcgagggaggcaacctcccagcggcctgcacggctgacaagagtcaggccgtactggctggtccgggtagtggattcgtcgccggtgggctggcatgtcacggtcaccgtgacggtaatcttctgccggtctgagggggtggggacctcgtcaggtcccaccacatgagtggttttcactgatacgcatggggctgggtcaaccgcggtgaaagcggtccctgggctgctccatctcgacaggtcggtattcccggtcagcatggcggttaggaagcctgaagaggcttgggcggccgggtcggcggtgcgaagctccgaggtgtctagggtgggggctgaggccggtgcaggcatggggatctgtccaggtagacgcaaggcgatggccttgccgttggaatcgacgtggaccgggactgaccaggcctgtccgctcccggattggccgcccatggtgaccacggtgacctgccacaggctcggatcagacggggagacggtagcgtcataggcggtgacggtggtgggcgctggaccaggtttgcggggcatgcgcgcatcggtgatcttggccgccaccaggtgttccagattgtccaagtgcccggagtcagaggtcagcagaagagtagtcacctcgaccgcggtggctgaggcgatctgagctgtgcggcggtcgtgatgggtggtgtcagtgctgacagctgtggtgggagcggatgccggggccgccgaacggaccagggcaacggggccgcatgcgactccgcacagcacgagggcaaggaagcctttggtggccatcgatccggtgtggggccagggacccacgttttcctgtgcctgttttttcttggccgaccaacggcgggacttagggttagcggatgcaccttctggggtgcatgctcgtctcaatcgcatcggtcacctccttcactggatgaagggaccaaggaggtgaccgatgtgcggtcgaacccgaaaaagttcaaacttttttctgggtctgcctcaagtacgacagaaggcctgcatcatcacggcgttgtggtagcagatcttgcgtcagcgcaaatgtatgggcctcgtaggagtagctcttaggtgggtcccggtggttgcggccagggcgagggtgtcgggtatgtgtagcgctagtcccgggttcgtggtgtgagggcttttgggtgctgacatgcactacccattgctagacgctgtgctgtggcatggctggacgtctagcagacgggttgacatcacctttaggctggcagcgcccgaggccgcaggccagaggaagcggacagcctaacgattgacgtccccctctcctttccccaacctcctggagtcgatgacccggagatagatcgatgtctatgcatctgtgcatcgatatacctatgtatctgtctgtggtttttagaggccactcccgtcgccccgggccgctcagcgataccgcaaggctgtgtgggatcagct

SEQ ID NO: 223 - DNA, 2020 bp, Propionibacterium acnes
  source 1..2020: mol_type = genomic DNA
ttgggtccccagatcgacgtggatacggcaggcggctgccatgcgcagcagggagccgatccagccgaaaacggggcattctccgggcatcccagagaccttgatcgttgaccaccagtttttcgcgttgccgtagaactggcggtactcgtcgatgaggaccagcacgcgggtgaagtcggtctcgcgggccccttcttcttcgatgcggcggtagcggtcctccatgagagaccacagccagtggatgagggcgacctggtcggggacggtagtggcgaccatctcgatgttgggccactcccgcaggcccaggtactcgatgcgtttagggtcgatgacgaagacgcgccagttgcggcgggcaccctcgacggcgtcgccgatcatggacaccgtttttccggtacgggtgcggccggccttgagctggtgggccatgacaccggagatgtcccagaaacaggtgttgccgtcctcgtcgacggcctgggggattttctcccagtctggggagtctgggcccggaagggccacgggtcggggcaccatcgagggcagggggtggcggcgggtgacggtgatggtgtcgtgttccaggtcgaagtcgctgcgccactggccgagcatcatcgccgaggtcaccgcggccaggcgcaattggatgttcgggctggacaaatgggcgccacgttggtggtgaatggtgaagccgtccaggttcccccgatcggttttccaggaatcgacggtgaccgccgacccatagatctgagtggctacttctttagcccgttccttgtctcggtccagatcggttttgtcagggtcaggggtcggggcgcggtattgcaggacgaaccggccggccgggatcgttgcggatgtcaccgtgaactctgccggcgaccaggcagccgcggccgcctgggtgagggccattggcatggtctcgacggcagcctcctcgggggggatggtgagggtcaggcgtcgcggatgcgtcttcttgcgattccatgtgactttctgcctcaccggcaccttcgccgccgactgaatggctaggcgagctgattcggcagtttcggtacgccggccagcgcgtagcgcccgtcgtgcgtgaaggctgcccaccacagcacagcccatacacggcagccaccagcgcggatcagcggctgctgcatagcccccggtagctagtaccgcacctgaccagccggccgcgatacttttccacgccggtttcgcgccaccaggaccagcgttatggacggtctgcttcgaggctgcggagggacgagacagcggagtgctggtcatgctgcggcctccttgtggcaggtcatttcacaggcatgccggccagcgatgatgccgtggcgcaccgccccggtagccgcatagaccgcgcacaactcaaacacggggcacccatcgcaggccgccggatccatgctctctttgtcccacgatggtgggtcatcggtgcacggcacggccaggccatcctgttgagcggcgctgatagcggtgaataggcgcagctgggcgcgaacttggtctggggtcaggttgacggtgcgggctacacgcatggggttccttcctcttcaccagtgaaggttccctagacccggccgatgtgcggagggatttcagtgttttatcgaggtgaccagccagccggtctgcgctgcgggttcaggtaccagggtcagatgcagcatggtgtggtcggctaggggcacggcgaccaggggcccgtcggcgctcgccccggtgagggtgggagttccggccacggtggtggcaggaatctggttgggtttcgcggccatcagggagcccatgagggtcggtgcggcgatctggacgagggcgactttgcgggcggcgggatcgcgggtcaaccagccgcgggtgaaagcgagcgccgccgacgtgatatcggggctcagcggggctggagtggcggctgggtgggccgttgaggagggccacacgcgcggtagcg

SEQ ID NO: 224 - DNA, 8643 bp, Propionibacterium acnes
  source 1..8643: mol_type = genomic DNA
caacgctggattcggcgatggtcacccattctccgtcgatattgatgagcaccccagcggccagctccgtggcagcaaccgggtgaggtgggttgtagaagcggtcgatgtcgcaggcagggtcgtcgggttcctcgactaccggaggtggggtcgatctggctgtctcggtgtcgtcggccaggtcggctcccaggatgcgctcccattcggggctggttttcttgcccgctgaggccatcgtctcgtcgatctgttcgtcagtgggccacacaaatttctttttggtccaggtcgtggtgtcgggtcgcagctgatccagcagttccaggtcttgcggggagtgggccttgcgggggtcgggggtgtagaagaattggacttccttgggggctgattcgccggataggtaggtgccgcggccgcgtttgccgaacgggatgcccacgccgacgtgttcggagccgaacatcatgcgggctccgtcagcggacaggggtccggtggcggcacgcccggagaagttgtctcggatttcgccgcccaggaactcggcgtcggggcgttgggtccccagatcgacgtggatacggcaggcggctgccatgcgcagcagggagccgatccagccgaaaacggggcattctccgggcatcccagagaccttgatcgttgaccaccagtttttcgcgttgccgtagaactggcggtactcgtcgatgaggaccagcacgcgggtgaagtcggtctcgcgggccccttcttcttcgatgcggcggtagcggtcctccatgagagaccacagccagtggatgagggcgacctggtcggggacggtagtggcgaccatctcgatgttgggccactcccgcaggcccaggtactcgatgcgtttagggtcgatgacgaagacgcgccagttgcggcgggcaccctcgacggcgtcgccgatcatggacaccgtttttccggtacgggtgcggccggccttgagctggtgggccatgacaccggagatgtcccagaaacaggtgttgccgtcctcgtcgacggcctgggggattttctcccagtctggggagtctgggcccggaagggccacgggtcggggcaccatcgagggcagggggtggcggcgggtgacggtgatggtgtcgtgttccaggtcgaagtcgctgcgccactggccgagcatcatcgccgaggtcaccgcggccaggcgcaattggatgttcgggctggacaaatgggcgccacgttggtggtgaatggtgaagccgtccaggttcccccgatcggttttccaggaatcgacggtgaccgccgacccatagatctgagtggctacttctttagcccgttccttgtctcggtccagatcggttttgtcagggtcaggggtcggggcgcggtattgcaggacgaaccggccggccgggatcgttgcggatgtcaccgtgaactctgccggcgaccaggcagccgcggccgcctgggtgagggccattggcatggtctcgacggcagcctcctcgggggggatggtgagggtcaggcgtcgcggatgcgtcttcttgcgattccatgtgactttctgcctcaccggcaccttcgccgccgactgaatggctaggcgagctgattcggcagtttcggtacgccggccagcgcgtagcgcccgtcgtgcgtgaaggctgcccaccacagcacagcccatacacggcagccacgagcgcggatcagcggctgctgcatagcccccggtagctagtaccgcacctgaccagccggccgcgatacttttccacgccggtttcgcgccaccaggaccagcgttatggacggtctgcttcgaggctgcggagggacgagacagcggagtgctggtcatgccgcggcctccttgtggcaggtcatttcacaggcatgccggccagcgatgatgccgtggcgcaccgccccggtagccgcatagaccgcgcacaactcaaacacggggcacccatcgcaggccgccgggttcatgctttctttgtcccacgatggtgggtcatcggtgcacggcacggccaggccatcctgttgagcggcgctgatagcggtgaataggcgcagctgggcgcgaacttggtctggggtcaggttgacggtgcgggctacacgcatggggttccttcctcttcaccagtgaaggttccctagacccggccgatgtgcggagggatttcagtgttttatcgaggtgaccagccatccggtctgcgctgcgggttcaggtaccagggtcagatgcagcatggtgtggtcggctaggggcacggcgaccaggggcccgtcggcgctcgccccggtgagggtggggggtccggccacggtggtggcgggaatctggttgggtttcgcggccatcagggagcccatgagggtcggggcggcgatctggacgagggcgactttgcgggcggcgggatcgcgggtcaaccagccgcgggtgaaggtgagcgcagccgacgtgatatcggggctcagcggggctggtgtggcggcggggtgggccgttgaggagggccatacgcgcggtagcgctggcgacatcgagcgggtcggagtggggtcaggtgtggggcttagggtccgatgtggcgatggggctaccgccccggtggtgggagacgagactggttgggggtggtgttgagggcgtgggatcagggtgaaggcagccaaactggccgggatgaggatgacggccgcgccgacacttcggagcgaggtcatgtgacgatccttcggtagctcgacgggttgccgtagatcttttccacgttgatgccactatgtgggttgtcggcgctaaccatttggcctccaccgatgtagacggccacgtggtgggcagggcttccccagaggatgaggtcgccgactttgagctggtcacgggccacagcagtgccgactttctgctggtcggcggcggtgcggggaaggctaatgccgatacgccggtacagcgccgaggtcaggcctgagcagtcgtagccgccatcggctttgccgttgccaccccacacgtaggcgtaggagttgttgtcggcgatcgatttggcccatgccacggcttcggccaggttcttcgacacaccggtctcgttagcggccccggtggcacagttgtttgacaggtgccctgtagtagtggatcccactatttgtttggccatggtttcccatttggcgtaggcatcgggcagggctgagccttgcactgcctgagctgcctgcgtcagcggcatcttctgccagtcagcgatgtcgactaaaccgggaatgtggaatccagggccgccggccgatccggggccagcgtaggtgatggtgtggcctttcaagaacgcctcggtggcgtaggcatcattgttgacctgatccagagtcccgtaccagcccggcaggatgcgctgctgaaaggggccggcgtcaccgtcaccgttagccttcgctgaggtagggtcggccccaagatctgattcttgtttggcggtcataatagcgatgaccgctgcctgggtaggcagtttgtcacgctggaccacagtgacgatggtggtcacgagctgcttctgcctggccgtgaggcctccggcacccacagtgcctccggtgacggtacccacgcaagcatccccgccgacactgccaccgccgccgccagagttgtcgtcgagggccccagagcctactgacagcagcggcacaatgatcacggtcgcgggcaagaccgccaggcccgccagcatcagcactgctgcactcaccacggcgatcacgtgagatgctttcaacgctgcccacctttcgctggtttgagggggcgacgcctgctggtacgcacaggcttggttggtccagtccgccgttggttggcaggcctgggtttgatcggcttgctgggacccggtttgggctccggagtcttaggctccggcttcacatgcctaggcacttcggctgcggtgggaggagtcagcacgtggcgtaccggcttggtgaccttctgggcacccgaaacaaccggcttagacaccaccttggcacctttgaccaccggtgcggctgccttcgcgccggccttcttgactgcacgatgcgctttgatagccccggcctcggcccggccaaccctgctagcagtagcatcgagggctctgtggcccgtcgttgccctcaccggtgcatccttgccctgacgggcctgcttcgcgatcatcgacataccgccccgcaacgccgaaacacggttgtgagcgtgggcgacggccgacataccagctgtcgtaattttcgactggccctgcggagctcctcccccggtacggatctgacgatatgacgccgaagcacgccgcgccgccgaggccattcgcgccatcttcgcagcccgggtcactcccaccgacgcgccaccggtgactaccgcagccgcagccgaaaccatccgccttcgacccaatccagtgagcttgcgaccaccgctgcgcaccatccggcgagcaccccgcccagcccactggccaatcgccgacgccccttcagagcgcttactacgcatccagtcgttgatcttggccctcagcccctcctcacccttgtgactacgccacagagacaccaagaatccgatgattcccacgatttccaacatgttgacgaccatgaccttgatgacaacgttgccatcagaggcgaagaccgacttgatgacgagcatgaccacgcccagcatcaccatcgacccaacaatgccgatcatcgagtacaagatcgaacacagatcccggataagcgggtctgtgcgaccaggaatagcccgcagcacgttgagcatcgacatgaacgccgaccacaccaacttgcacacgtagaaccagcacatgcccgcgaacaccagcaggattgctgccaaacccgtcaccgttgacgagtaaaagaagaaccccaccaaccaggaaccgtccgcaatatcgccggcgtaatccgataatccctcgtcacaatcaccgaggtcgtcgcgtgcatccgagatatcgtcgtaaggaccacctttgagcacctcgatgtacttgtcgtgacatttggaatcaataatgcggccgtagttgagttgctgatgaaccggcgccacgaacgagtccacaatgatcgccgacagcttcggatccttcgagtctcccgtcgaggtcatgtcatcaggaatctcgacctcaccagcggtcgccgtcgcaggatcaaccgaactggtaatcatatgagacagcgccacaccgaactgctgggtgcgagccagcggagtagccaacgtcgtcgtatcgcctgcgaacttcgccaccggggccgccaagaaacccaacgccagcgccgcagcaatcgccgcacgcgcacccgtagcccacgcccctgccgtacgtcccctcatcatcttgacgaccacgcccacaccggcgcacgtcgtcagcaacgtcaacaccgttccaccccagctgtccgctcccagcggggccaaaaccttgtcgtggatgtcgttctgtaaccccaccagcggtccggtaatccacccgacccagctcatcgccacggtccagtccaacaaccggcacaacagggcaatgaccatcaggtacgtgttccaacacatgccaataatggaggcccacatagccttcagcggggccgtaacgccaccatcgtccatcgacatctggtactgaaacaagtgaataccgttggagtcagtcacattgaaaccgtcacccatccagcccagccccgggcccgatgccatggcaggcacactgctcagcgccaccaccagaaccagcgtggtgacgatgatacggaaccaccgctccccggttccggggcggcgtggatgacggctcacgctgtctcctggtcgtgctcgggcgggttggagctggcggcttcgcggtggggagcgtaggcaggtctcagtagtcgaatttcaccgacgttgccgtgttggtcggcgtacaggccacaaccggggcctccggggttgagggcaatcttgaccaggtcagcgaactcttcaggggacgttttagggtccacgcccaggaactcgacacctttctgggcgaggttgatgttgtcgcacagcaacacgatgcgatgctgaatgaggttgcggacggtctcgttggggtaatcggcctcggggtcgtgggagccagtaatgagccaggcgttggctcggcgggactcacgcacgtactcgtcgatggcgtgggaggcttccggcgaggacgacatgtgatgaaactcgtcaacaatgaaagcggcgtcgcgggcccggtcgctgaagcacaccaggcgagccagacgggcaatgagcgcgtagagggctcggccaaacaccttgtgcgggggcagctgccgaaacagatgttctgacagcatctcctcggcgttaggaagagcgatgccacaagtgccaatgatgaggatgtcggcactcaggtcggcgggaggaaggtccgggtcaaagatggccgaagctagggaggccgagttctcgatgtcagcgaacacggcaatccggtcggcgatcgcggtggcctcgggaaggtcgcattcctcggccaggtggcgggccagacgcccacacgaggtgatctggtggtcacgcatgtaggccggtttgaggaccttggccagcgtggtcccggccacaccgatggtctccaagttaagcaaggtcagcaagaacgactgggcgacctgcccggccatctccgggggaaggatgcgcagcgggtccagcgacagcttggggtgggccgtgtcgacgatctggcgtctaaccccgtcgatagagttgacaaaggttacccactcccgctcatcggagttgtcggtggcaataatgcgcccgccccgggccgcgatggctgcgcacagccgcttctcggccatcgtcttgcccgcgcccatcttgccgatgaacgccaccgtgttgcctttctgatcctgagtgtcggcatgcaaatcgaggtaggccagcgactgcaacggggagcctgtgaccacagccaacgggatgccggtggtacggcccaaccggtactcaaccaccgggatagatgcggcgaacgcggaggcgtgagtcagctgacggtaggcgttaagcgaggaggagaaccggccaccgggccgggcagcccacagcaagtcctcctgacggcccacgggacgcacccacgtgaagtcaccgaacaccggatcattgacgaacgctcctgccagctcctcggtggtctcaaagtcaggagacgagacagtgacggtgataagagcctggatctcgacctcacgctcatcggcggccagctcggcgttgtagtcgacgagcacctgagcggaatgctcgatagacatgagggtcgaagcctgggtcatctcaccgccctcgacgttgtcgagctggtcgacggtttggcggatggcccgctgatttttctgcatcgcagcgtgacgggtccgggccactccccggatcgccacgtcgaccggcacgccagtgtcgtcgatacggcccaaaaactcgtaggcaggccacgtcatcgtgcggggcaccttacccagcacgatatgggactggtagacggtctcgccggtgtcggcaccgattttgaggacgcgacgattccacgcctgagccgtccgggacatgtgggagactcgcttgtcatcctcgctggccagcaggtcggaggtcgcggcctcatcgatgaccaactcccccagcgcggcacgtccaacctcatccatgagggcgattccctcgccaggggcatcatcacgcaaccgggtcgggtggcctgacaggtgctgccgaagccagatctgttcatcaacggtgaccgggcggggttggaacgctgccggcagtttcgcaccgaattccttagcctgacggagggcccactcccgtgcgacacggccaggagcggtggtcatgagtccggcggcttcggtgattttgttgagggcggcggtccaggcggtgtgggtgcgtattttctggtcttggttgagtttgatcgataggaaccacacgcgccggcctagggattcggtttcaggctggtcgagggtggcgtcgatttcgtcggcccacacggggtgttcgctcaggtcaaggccggcggccatggcgtcgacgatttctgtggggtcggtccaggtgagggctccgttgaggcagaactcgtggcgggcgaggtggcggaataggtcgcggtgagctgcggcgacggtgagggaggcgttctcggtgacgggtcgctggaggggagtgagtcgccaggtggcccagatgtcgccggtggaggtccagacgaggttgtcgaagaggaaccgttcggggatggacatcatgactccttttcggcggcggcgaggaaggcttccaggccgctgcggcgtacagcgttcccggtagggtgcaggggttttctgggggtgggttcaggtttcgggtctgggaggggtttgggctcgtaggtggtgtcgatgtcttcggcgaggacgtggtcgagcaggcaggtggccggggtgtcg

SEQ ID NO: 225 - DNA, 8232 bp, Propionibacterium acnes
  source 1..8232: mol_type = genomic DNA
gggatgaggatgacggccgcgccgacacttcggagcgaggtcatgtgacgatccttcggtagctcgacgggttgccgtagatcttttccacgttgatgccactatgtgggttgtcggcgctaaccatttggcctccaccgatgtagacggccacgtggtgggcagggcttccccagaggatgaggtcgccgactttgagctggtcacgggccacggcagtgccgactttctgctggtcggcggcggtgcggggaaggctaatgccgatacgccggtacagcgccgaggtcaggcctgagcagtcgtagccgccatcggctttgccgttgccaccccacacgtaggcgtaggagttgttgtcggcgatcgatttggcccatgccacggcttcggccaggttcttcgacacaccggtctcgttagcggccccggtggcacagttgtttgacaggtgccctgtagtagtggatcccactatttgtttggccatggtttcccatttggcgtaggcatcgggcagggctgagccttgcactgcctgagctgcctgcgtcagcggcatcttctgccagtcagcgatgtcgactaaaccgggaatgtggaatccagggccgccggccgatccggggccagcgtaggtgatggtgtggcctttcaagaacgcctcggtggcgtaggcatcattgttgacctgatccagagtcccgtaccagcccggcaggatgcgctgctgaaaggggccggcgtcaccgtcaccgttagccttcgctgaggtagggtcggccccaagatctgattcttgtttggcggtcatgatagcgatgaccgctgcctgggtaggcagtttgtcacgctggaccacagtgacgatggtggtcacgagctgcttctgcctggccgtgaggcctccggcacccacagtgcctccggtgacggtacccacgcaagcatccccgccgacactgccaccgccgccgccagagttgtcgtcgagggccccagagcctactgacagcagcggcacaatgatcacggtcgcgggcaagaccgccaggcccgccagcatcagcactgctgcactcaccacggcgatcacgtgagatgctttcaacgctgcccacctctcgctggtttgagggggcgacgcctgctggtacgcacaggcttggttgatccagtccgccgttggttggcaggcctgggtttgatcggcttgctgggacccggtttgggctccggagtcttaggctccggcttcacatgcctaggcacttcggctgcggtgggaggagtcagcacgtggcgtactggcttggtgaccttctgggcacccgaaacaaccggcttagacaccaccttggcacctttgaccaccggtgcggctgccttcgcgccggccttcttgactgcacgatgcgctttgatagccccggcctcggcccggccaaccctgctagcagtagcatcgagggctctgtggcccgtcgttgccctcaccggtgcatccttgccctggcgggtctgcttagcgatcgccgacatgccgcctcgcaatgccgaaacatgattgtgggcgtgggcgatcgccgacatgccggccgtcgcgatttttgactggccctgcggggcccctgccccagcacgaatctgccggtaagccgccgacgtgccacgagcacccgccgccattcgcgccaccttcgcagccctagtcactcccgtcgacacgccacccgtggctaccgcagcagcacccgagaccacagtcgaggccatccgccttcgacccaatccggtgagcttgcgaccaccgctgcgcaccatccggcgagcaccccgcccagcccactggccgatcaccgagcccctttcggaacgcttgctgcgcatccaatcgttgatcttgtccctcagccccttctcgcccttgtgacgacgccacatggacatcaagaacccgataatccccacgagctcgagcatgttgacaaccatgaccttgatggcgacatcaccgtcagaggcgaaaaccgacttgatgatgagcatgaccacacccaacatcaccatcgacccgacaatgccgatcatcgagtacaagatcgaacacagatcccggatgagcggatctgtgcggccagggatagcccgcaacacgttgagcatcgacatgaacgccgaccacaccaacttgcacacgtagaaccagcacatgcccgcgaacaccagcaggaccacagccaaacccgccaccgtcgacgagtaaaagaagaaccccaccaaccacgaaccatccgcaatatcgccggcgtaatccgacaacccctcatcacagtcaccaaggtcgtcgcgagcatccgagacgtcatcgtaagggccacccttgagcacctcgatgtacttgtcgtggcacttcgcatcaataatgcggccatagttgagctgctgatgaaccggcgccacgaacgagtccacaatgatcgccgacagcttcggatccttcgagtctcccgtcgaggtcatgtcatcaggaatctcgacctcaccagcggtcgccgtcgcaggatcaaccgaactggtaatcatccgagacagcgccacaccgaactgctgggtgcgagccagcggagtagccaacgtcgtcgtatcgcctgcgaacttcgccaccggggccgccaagaaacccaacgccagcgccgcagcaatcgccgcacgcgcacccgtagcccacgccccagccgtacgtcccctcatcatcttgacgaccacgcccacaccggcgcacgtcgtcagcaacgtcaacaccgttccaccccagctgtccgctcccagcggggccaaaaccttgtcgtggatgtcgttctgtaaccccaccagcgggccggtaatccacccgacccagctcatcgccacggtccagtccaacaaccggcacagcaacgcaatgaccatcaggtacgtgttccaacacatgccaataatggaggcccacatagccttcagcggggccgtaacgccaccatcgtccatcgacatctggtactgaaacaagtgaataccgttggagtcagtcacattgaaaccgtcacccatccagcccagccccgggcccgatgccatggcaggcacactgctcagcgccaccaccagaaccagcgtggtgacgatgatacggaaccgccgctccccggccccggggcggcgtggatgacggctcacgctgtctcctggtcgtgctcgggcgggttggagctggcggcttcgcggtggggagcgtaggcaggtctcagtagtcgaatttcaccgacgttgccgtgttggtcggcgtacaggccacaaccggggcctccggggttgagggcaatcttgaccaggtcagcgaactcttcaggggacgttttagggtccacgcccaggaactcgacacctttctgggcgaggttgatgttgtcgcacagcaacacgatgcgatgctgaatgaggttgcggacggtctcgttggggtaatcggcctcggggtcgtgggagccggtgataagccaggcattggctcggcgggattcgcgcacgtactcatcgatggcgtgggaggcttccggcgaggacgacatgtgatgaaactcgtcaacgatgaaagcggcgtcgcgggcccggtcgctaaagcacaccaggcgagccagacgagcaataagcgcgtagagagcccggccaaacaccttgtgcgggggcagctgccgaaacaaatgttctgacagcatctcctcggcgttaggaagagcgatgccacaagtgccaatgatgaggatgtcggcactcaggtcggcgggaggaaggtccgggtcaaagatggccgaagctagggaggccgagttctcgatgtcagcgaacacggcaatcctgtcagcgatcgcggtggcctcgggaaggtcgcactcctcggccaggtggcgggccaaacgcccacacgaggtgatctggtggtcacgcatgtaggccggtttgaggaccttggccagcgtggtcccggccacaccgatggtctccaagttaagcaaggtcagcaagaacgactgggcgacctgcccggccatctccgggggaaggatgcgcagcgggtccagcgacagcttggggtgggccgtgtcgacgatctggcgtctaaccccgtcgatagagttgacaaaggttacccactcccgctcatcggagttgtcggtggcaataatgcgcccgccccgggccgcgatggctgcgcacagccgcttctcggccatcgtcttgcccgcgcccatcttgccgatgaacgccaccgtgttgcctttctgatcctgagtgtcggcatgcaaatcgaggtaggccagcgactgcaacggggagcctgtgaccacagccaacgggatgccggtggtacggcccaaccggtactcaaccaccgggatagatgcggcgaacgcggaggcgtgagtcagctgacggtaggcgttaagcgaggaggagaaccggccaccgggccgggcagcccacagcaagtcctcctgacggcccacgggacgcacccacgtgaagtcaccgaacaccggatcattgacgaacgctcctgccagctcctcggtggtctcaaagtcaggagacgagacagtgacggtgataagagcctggatctcgacctcacgctcatcggcggccagctcggcgttgtagtcgacgagcacctgagcggaatgctcgatagacatgagggtcgaagcctgggtcatctcaccgccctcaacattgtcgagctgatcgaccgtttgacggatagcccgctgatttttctgcatcgcagcgtgacgggtccgggccactccccggatcgccacgtcgaccggcacgccagtgtcgtcgatacggcccaaaaactcgtaggcaggccacgtcatcgtgcggggcaccttacccagcgcaatgtgggactggtagacggtctcgccggtgtcggaaccgattttgaggacgcgacgattccacgcctgagccgtccgggacatgtgggagactcgcttgtcatcctcgctggccagcaggtcggaggtcgcggcctcatcgatgaccaactcccccagcgcggcacgtccaacctcatccatgagggcgattccctcgccaggggcatcatcacgcaaccgggtcgggtggcctgacaggtgctgccgaagccagatctgttcatcaacggtgaccgggcggggttggaacgctgccggcagtttcgcaccgaattccttagcctgacggagggcccactcccgtgcgacacggccaggagcggtggtcatgagtccggcggcttcggtgattttgttgagggcggcggtccaggcggtgtgggtgcgtattttctggtcttggttgagtttgatcgataggaaccacacgcgccggcctagggattcggtttcaggctggtcgagggtggcgtcgatttcgtcggcccacacggggtgttcgctcaggtcgaggccggcggccatggcgtcgacgatttctgtggggtcggtccaggtgagggctccgttgaggcagaactcgtggcgggcgaggtggcggaataggtcgcggtgagctgcggcgacggtgagggaggcgttctcggtgacgggtcgctggaggggagtgagtcgccaagtggcccagatgtcgccggtggaggtccagacgaggttgtcgaagaggaaccgttcggggatggacatcatgactccttttcggcggcggcgaggaaggcttccaggccgctgcggcgtacagcgttcccggtagggtgcaggggttttctgggggtgggttcagatttcaaatgtgggaagagtttgtggatggtatcggtgtcctcggcgagggcttggtcgagcaggcaggtggccggggtgtcggtagtctcgtccagctcgtcgatcatctcgtcgaggaggttgggggtggtggatgcggcccacacaggtgggatagccggtgcgggtcgaggcggtgtggggaggcggagtttggtttggccccagaggggtgtgtgggtcatgccggcgggagtggtggcggcgtgagtggtcacacgccaccagcccgccagccatgccagaggtgaccaggtccagtcgatgcgaccaacaacgaactgggcgagccatccggcagccagcgcgaaaatgaaaccgcggatggtcatgcccccgtcgataattttgaagcccatcatcgcggcaggaactacgccgccgacagcgagcacctgatagatcgtgtagggcccgccaggaatccttcgacccgaagagtccttgccgatgatgcggggctgctggcgggcctcggtgtgccactgaatatccacgatcagctcttgcccaatccttgcatcatctgtccgaagaattggatcgcgttaccttcgataagccagtacgccataccacacacaaacagcatggagacgatcttggccaggctcataccgtgtttgaagatgttgaacgcggcaatgcccacgactacgaccatggcgacggctcgcaccgcggacttgccttcacctgccttgatcgtcgtccattcgaagaggttccgtgtttccagtggcagcaggaggaattgatcgagcatgagaggttttcctttcaggaagccgaccgggatggtcccggtactgacgggctgggcgacacgggtgtgccgtccggaggcagaaggcgtgacggctggtcgagggaggcaacctcccagcggcctgcacgactgacaagagtcaggccgtactggctagtccgggtagtggattcgtcaccggttagctggcatgtcacggtcgcggtgacagcgatcttctgccgatctgagggggtggggatctcgtcaggccccaccacatgagtggttttcaccgatacacacggggctgggtcaatcgccgtgaaagcggtccccgggctactccatctcgacaggtcgtcgctgccactcagcatcgcggccaagaaacccgaagaggtctgggcagccgggtcagcaggacgaatctccgaggagtccacgtcgggggctgaggccggtgcaggcatggggatctgcccaggtagacgcaaggcgatggccttgccgttggaatcgacgtggaccgggactgaccaggcctgtccgctcccggattggccgcccatggtgaccacggtgacctgccacaggctcggatcagacggggagacggtagcgtcataggcggtgacggtggtgggcgctggaccaggtttgcggggcatgcgcgcatcggtgatcttggccgccaccaggtgttccagattgtccaagtgcccggagtcagaggtcagcagaagagtagtcacctcgaccgcggtggctgaggcgatctgagctgtgcggcggtcgtgatgggtggtgtcagtgctgacagctgtggtgggagcggatgccggggccgccgaacggaccagggcaacggggccgcatgcgactccgcacagcacgagggcaaggaagcctttggtggccatcgatccggtgtggggccagggacccacgttttcctgtgcctgttttttcttggccgaccaacggcgggacttagggttagcggatgcaccttctggggtgcatgctcgtctcaatcgcatcggtcacctccttcactggatgaagggaccaaggaggtgaccgatgtgcggtcgaacccgaaaaagttcaaacttttttctgggtctgcctcaagtacgacagaaggcctgcatcatcacggcgttgtggtagcagatcttgcgtcagcgcaaatgtatgggcctcgtaggagtagctcttaggtgggtcccggtggttgcggccagggcgagggtgtcgggtatgtgtagcgctagtcccgggttcgtggtgtgagggcttttgggtgctgacatgcactacccattgctagacgctgtgctgtggcatggctggacgtctagcagacgggttgacatcacctttaggctggcagcgcccgaggccgcaggccagaggaagcggacagcctaacgattgacgtccccctctcctttccccaacctcctggagtcgatgacccggagatagatcgatgtctatgcatcggtgcatcgatatacctatgtatctgtctgtggtttttagaggccaccccccgtcgccccgggccgctcagcgataccgcaaggctgtgtgggatcagct

SEQ ID NO: 226 - DNA, 4813 bp, Propionibacterium acnes
  source 1..4813: mol_type = genomic DNA
ccgaaacgttccagcccgccctgttcgagctagccgactgcgcatgagaccccacacaaacatggttgaatcgaagggctcagccagcagccagttaccaggagtccccgtgcgtctataccgcgctgttcttacccacaccgacatccagatcaccgtccgcatctggagcaccaccgaccacgactggacctggactcccctcgacacctggacccccgacccgaccccgaccacaccagcccagttagccgacgaactccaccgacacggatggaccacccccgaggaccccaccaccctcaccaaggtgactgtgatccccgagaactggcaggccctcgtcgaccacgccctcgctgcccgaaaccaccaagccaaccagctgcgcgtcgccgagaacatcctcaccgacatcctcggcgacgccgccgacgccggcctgtctgtcaccgctctcgcccgcacgaccggactatcccgagtcgccgtctacaaacgcagcgccaaaaccatcgactccatgagacacgccacccaggccggcggaatcctcaccccctcctgtctcacccacgctgagagaacagcgctcggcctgcccgacgagtaacccatcgtttacatcctcgactggtccctgcgaccagtgaaccgtgcccccactgcgcccacaatgatcagcacacccacggcgaccaccaggtgggaagcactaactgatcccaacgaaccaagatcaaacaagccctgcccgggagcgtcgagcagtccgtgggcgcgaagccatgctccgagattgccaatgatcttggggatcatcttgttcagtagggctatccctccgatgccgacaacgaggaagacgaggatttcttcgcctgcgttgtttcttcctgtgtttgcggtcatgctgccttctcggggtggatggccagccagctgatgaggttgtcggtgatctgccctgagatttggatcagttcgacttgcccggcctgccatgcccgcgatgtgccggccagcaatgatgctgggacccctactgcgcggccacgggatgcaacctcagccaaggcggcgcgtaactcctcgacggtgctttcgatgtaccaactgccgtcagtactagtctcggtggcgtcggtggtagcgataagagcatcggtgaggtcgtcgacggcgcggtccagatcagcgatgtccggtagggctacagcagtcatggtgtgtcttccttctagggtgccttcactggtgaagggtccctagccccggccgatgtgcggtgctgtgggaaaaatgcttcccattggtccgtcttagttaggaaacttggcctaagtgctgtcgagggtcgcgtgttcgtgaccggttcgaagacactgccgctttgccttcttgcccgtggcgcttccgagatgggttcagtgggcgatggctaggccgatgagggcgccgctgcacaggctgggtgcccaggggaggaatcgggtggtgtggtgtcggcagcggtcgatgagggcatatagggcgatcagggtgaggccggctatgaccgtggcgtggatcgtgtcgatgccggttgctgcggccggggctgcccacagtggtgtgatgcgcacgtcggagaagccgaagccgcctcgggagatgagccaggcgatcatccacgccgcggagatgacgacagtagcgatagcagcacggatcgccgcagtctggttcgcgagagcgatcatggccacagccccgatccatccaacccagccggtccaggcgaggactgccggtatccatgtggtgatggcgtcgatgacggctacccatgccccgatggtggctagcagagcccaggccggccaggtgggtgctggggcccacgctacggcggcgatcatggttgtcgcagatgcagcacagacagcgatcatgcttcggagactgtaggtgtcgcggtaggcgattttgtcgggggtggcggtggccggttcgggcaggatgcgagtgagggagggccatcctgcggtcgcaatggtcacgacggcggcgatccacacgatctggtgcatgggtctcatcatggcccaatatcgatgggtgtgggtggccgacatgggctcagtcgtcaagaggtgtacgggcggttgtggcttcttgggtgccgagcatgagggtgccagaatcctcgccggctgattcccagtcgacgatgacctggtcgccgtcaacgctggattcggcgatggtcacccattgcccgtccatatcgatgagcatcccggcggccagctctgtggcggcaaccgggtggggtgggctgtagaggaggtcgatgtcgcgggcagggtcgtcgggttcttcggttacctcgggtggggtcgatctggctgtctcggtgtcgtcggccaggtcggctcccaggatgcgttcccattcggggctggttttcttgcccgatgaggccatcgtctcgtcgatctgttcgtcagtgggccacacaaatttctttttggtccaggtcgtggtgtcgggtcgcagctgatccagcagttccaggtcttgcggggagtgggccttgcgggggtcgggggtgtagaagaattggacttccttgggggctgattcgccggataggtaggtgcctcggccgcgtttgccgaacgggatgcccacgccgacgtgttcggagccgaacatcatgcgggctccgtcagcagacaggggtccggtggcggcacgcccggagaagttgtctcggatttcgccgcccaggaactcggcgtcggggcgttgggtccccagatcgacgtggatacggcaggcggctgccatgcgcagcagggagccgatccagccgaaaacggggcattctccgggcatcccagagaccttgatcgttgaccaccagtttttcgcgttgccgtagaactggcggtactcgtcgatgaggaccagcacgcgggtgaagtcggtctcgcgggccccttcttcttcgatgcggcggtagcggtcctccatgagagaccacagccagtggatgagggcgacctggtcggggacggtagtggcgaccatctcgatgttgggccactcccgcaggcccaggtactcgatgcgtttagggtcgatgacgaagacgcgccagttgcggcgggcaccctcgacggcgtcgccgatcatggacaccgtttttccggtacgggtgcggccggccttgagctggtgggccatgacaccggagatgtcccagaaacaggtgttgccgtcctcgtcgacggcctgggggattttctcccagtctggggagtctgggcccggaagggccacgggtcggggcaccatcgagggcagggggtggcggcgggtgacggtgatggtgtcgtgttccaggtcgaagtcgctgcgccactggccgagcatcatcgccgaggtcaccgcggccaggcgcaattggatgttcgggctggacaaatgggcgccacgttggtggtgaatggtgaagccgtccaggttcccccgatcggttttccaggaatcgacggtgaccgccgacccatagatctgagtggctacttctttagcccgttccttgtctcggtccagatcggttttgtcagggtcaggggtcggggcgcggtattgcaggacgaaccggccggccgggatcgttgcggatgtcaccgtgaactctgccggcgaccaggcagccgcggccgcctgggtgagggccattggcatggtctcgacggcagcctcttcgggggggatggtgagggtcaggcgtcgcggatgcgtcttcttgcgattccatgtgactttctgcctcaccggcaccttcgccgccgactgaatggctaggcgagctgattcggcagtttcggtacgccggccagcgcgtagcgcccgtcgtgcgtgaaggctgcccaccacagcacagcccatacacggcagccaccagcgcggatcagcggctgctgcatagcccccggtagctagtaccgcacctgaccagccggccgcgatacttttccacgccggtttcgcgccaccaggaccagcgttatggacggtctgcttcgaggctgcggagggacgagacagcggagtgctggtcatgccgcggcctccttgtggcaggtcatttcacaggcatgccggccagcgatgatgccgtggcgcaccgccccggtagccgcatagaccgcgcacaactcaaacacggggcacccatcgcaggccgccgggttcatgctttctttgtcccacgatggtgggtcatcggtgcacggcacggccaggccatcctgttgagcggcgctgatagcggtgaataggcgcagctgggcgcgaacttggtctggggtcaggttgacggtgcgggctacacgcatggggttccttcctcttcaccagtgaaggttccctagacccggccgatgtgcggagagatttcagtgttttatcgaggtgaccagccatccggtctgcgctgcgggttcaggtaccagggtcagatgcaccacggtgtggtcggctaggggcacggcgaccaggggcccgtcggcgctcgccccggtgagggtgggagttccggccacggtggtggcaggaatctggttgggtttcgcggccatcagggagcccatgagggtcggtgcggcgatctggacgagggcgactttgcgggcggcgggatcgcgggtcaaccagccgcgggtgaaagcgagcgccgccgacgtgatatcggggctcagcggggctggagtggcggctgggtgggccgttgaggagggccacacgcgcggtagcg

SEQ ID NO: 227 - DNA, 1095 bp, Propionibacterium acnes
  source 1..1095: mol_type = genomic DNA
acaccgatcaagcggcctgtatcggcagcattgccgtacctctgcccggcctgatcctcaagccacgacaacgcatcccggaacaaccgcacgtcctccagggctaaaccgcagtcgtagccgcccttgtcccccaacctcacaatctggcgctcccggcgtcctcttttgtcgacctcgatccacagtttcgcgtgcatccgctggcctcggccttctgacaggatctcggtgagcaggtcggacgcctgccctcgcgcatcctcgttactgcgggggaattggagtatgtgggaggaacgacgatggggaaggttggtgacctcatggcgcagcaggttgcgcttgcgcatctgctgatcgagacgctcgggctgacctgttgacggggttgagccgtggcgccgcttcctcggcggggtctcgatccgttgctcttccggcggttcggcgtcaggttgtggtgcgcgatctcccctaggacgggggggctcgccacctatatccgagggacgatgagacggccttccacgcttgctgcgcactttcgcagcccgccccttgcggtcacatcgacgcggcggcggagtgacgtcctcaccgcgcgctagctgcgtcaacgccgacaccaggttggtgcccggtttcagcccttttagcacgaaccgcaccaggcgggggtctcggccgattcgtcgggcaatctcggcttggctccacccctcggctaacagggggcgcaacaagtcttgggcccggttatcacgctcagtcactggtcgccccctcggggagtcctgcctgctcggcctgctctgatagagcagcccgttccgatccggtctggggcgctttcaggggaccgggtaggacacctttgacacgcagccgcccgtccttgccgtcatcgccgcccccctgggccacagggagcgcccaggggggcacgttgctggtgtagatggcgtcgccgtggatagccagcagggtgcgggagttcatgcgtagtgctcctcccttggttgtggcgttttttccggtggtggggtcggcgatgggtgtgttgagggtgcgtacgcgggacagggcccagat

SEQ ID NO: 228 - DNA, 718 bp, Propionibacterium acnes
  source 1..718: mol_type = genomic DNA
ccggggccctgctgctggtgtgggacgtcaccgttttgaccgggcccactctcggccaccgcgtgcgtcctctcagtaaggacgccgagctgactgcccggcgctggctcgaccaggtcgccgacaaccccggcttcctcgacacccttatcgaggccgcccgcatcaccgatggatggcatcacgcgacgcctccgcacattcaggccccttaccggacccttcatcagtgaacggaggtacaacgacatgaccagcgacattgacattgaccggacccacaaacccgacgaccgcgccgaggctcctctttaccggtcctgggccaggagactcgtgcacgtctccgggatgccctggcgtatcgtcgccgccttggccggggtctcccccacctccatgcaccggcttctattcggccgcaacggtcgacccgtggaatggatcggcatcaatgatgctcgcgccctgatggatatcggcatcgatgatctcgcctcagcgtccaccgaccgtatcccggcccgcgaatcccgcgagctgttggtagccctgcacaccctcggctggaccgatgagcatctaagccgctggctgaccagttccgacctcgacctggccaccacccccaaggccctctacgtcacccggctatccgccgcccgcatccaggccacctacgacatgctcatcagccagcccgtccgccgctgcggcc

SEQ ID NO: 229 - DNA, 7861 bp, Propionibacterium acnes
  source 1..7861: mol_type = genomic DNA
tttgtccacccacccctgtcgattttgtccgccaagtattagacaaaccattagacagtgaattagaccctgggtcgcgtcagcgtgtgaactcaccaacgcgcgcgcgcgcggcggccgagccgccgaagccaaagaaacccataccaccaacgcctgaaccagcagcccccgcttcagacagtcctgtgtcagcgcacgctgatgaggctgccgagttggcgtggcagttcgtggggtggtgtcctcagctggtaggggcaccgaagaaggtgcgtggccagctccgccagatggtcgctgccgagatccgccggaatccgggctggctggatgcgccagcgttggaggttgttgcccagcgggtacgtgctgaaggtgcgctgggggtccagcactgtgagattgtgcgagccgagctgcacggggtgatcgccgaccagaaggccgcccccgcccgccccgacgccctgcacgcgcgggagcccaagtggtgggacgacgtgtactacgaaggaaacacaaccgtgtggtacgactctgacgaaaccagtgacgacgacgaggcgtggaaccggtcgcaggtatgtcatgttgctgagcgtgacgacatggctggcgggattgctaccaacctgctggcctcccacgctgatgatccgatggcctggctgactcgccgtcaaaccatgctgatggctcgtttcccccacgcccagaacgaggtcatcgcgatgtgccacatcgtgcgcaccgccctggaggccgacatggccgccggaacccggtgggaggactgatgagggtctcccggcgcgccctcatggccgtggcccgtgccgacgctgccgcagcagaccatgccaccggccgatgggtggccacagccaacgccaccgtcgcccggctgaccggactgtgcgaacgcaccgtccaatacgcccgcgccaccctggtccacctgggcctgtgccgcgtcgtggccaccggccgctacctcaccgccgacgagcggcgcacggctgctcgcacccatggcggccgccagatgcgcgccgcctccacccgcgtcctcaccatgtcctgcgcaatcgtttgcgccctaccccgaaggggtcaccactacaggaaagttaagttcctagatggtcaccaacgcacgcgcaggcgcgtgcgaaggccagcaacaccagagaagaaacccctgtggctgcaaaaactcgcagccctcctcgaccagcacctgccctggctggtgagaaaccatcacatcggccgactgtgccacgccctcaccgccctgggcatcgacgaacactggcaacccgcagacctcgacgccctcctcgacgccatgaaccgcaggaaccgtcgcctcggcctcgacgtgccatgcgccgacgaccagcacaaccccttgggactgttcatccatcaggcccgagacaccctcacccacgacaacccccatgaacgccgcctagcccgtgacgctgaacgcgcccggctcatcgacgaccaactccgccgccgcgcagaaaccgccacctgcgcagcccgcctcgcagccgagcacgccgaccccgactaccagacccgccgtcgtgaacgcagggaaaccctgcgagccacactcagggccgcccagcagcatgtcaggacacactgatacccgctcatacgcacaccatgaaacacgacaagccacctgacagtatcagctgcaagacgcatgacaacatagaaggacatgatgaaatacacatagacacaaccccgcacagcagtttcgcaacaaatcatgatagtctcatggcagtatcgcttgatacacacatagcatcactcccacataggcagttatgctgatatactcctactaggttatccgtccaacatgctgagtgggttcctgtacagcatgaaaggagcatggcatgatatgggccgttctcaactgcaagggtggtgtcggcaagacgaccagtgccctcctgctggcggcagccgccgccaagcagggccacaccaccctggtggccgacgctgacccccagggcaccgcatcccagtggtcagccctggcaaccaaaaacgacgaacccctgcccttcccggtgcaagcggtcaacatcgccaccatggaggcactgcccaccaccaccgacgcccatgatctcatcctcgttgacacacccccctcggcaggcgatctgatgttccaggcatgccgcatcgccgacctcatcatcatccccaccgccacctccggacccgacatctcccgaacatgggtcaccatggacgccacacaaggcacaccacgcgcgatcctcctcacccaaaccgaacacaaccgtgtcgtctaccgccaagctcgcactgccctcgccgccgacgacaccgtcgttctcctggaccacgacatcccccgccgtgaatccatccgcacagcatggggcaccaaccccccagacgacgtcatcacctactacctgcccgtcctcaacgaactcatggaggccctgtcatgaccaccaagaaaaccgacccattcgcccgccagaaagcagcagaagaccgcgcccaccaactccaagacgaagcccaacgccacgcccaccccaaacgcgtcatcggccccaccgcacgattccagttcgtcctgccagccgacgtgctcaccggcctcaaacacctcgccctcacccgcggcaccaccgcccgccaactcaccctcgacgccctcgacaccgcctacggcctcgacaccctcgccaacagcgggaagaaaacccacccatgacccgtgggtccccctgccaccaccccctcgacggcaactgtgtgcgagccacaggcccgcacacaggcggcagcccagtgccgtccccgccaggaaaggaactgaacttttctggagtgctggctccctatcaccccttatggtgctatcagatccagtagcgccagcccgagaggaaacccatgagctacatcgtccgcaccggaaatctagccggcacccccgagctgcgcgaggggtagccgacacggcggaccgtgcccctgacagtaagcggcactactggagacatcaccatgaccgctcagatcctcgccccgtgcaaccagaaggctgccgtcatcgaaggagccctgccatgaaccaacctaccccccacaaggccgacgagtcacagacgagcaacaccacgaggaagtggcggcacaaggtgtcgttctaccaagacccggccgacaccgaccgagtccgcggagcgatcctccacaccatgacaaccgaaggcaaccggaacctgagccagttcgtcaacgatgccgtcatggccaaggtgaccgaactggaagcaaaatacaaccacggcgagccattccccgccgtgggagcccgaggactcccccagggcggcgcagccgccaacagataagagggcggggaccaccaatagcagtcgatttcggatccagatcgggtagacaggacccatgatgaatttcatatcctccctgctctcggccatcctgaccctctttgcgatggtagccgtggcgataggagtggtgaacattgtgccgggaatatgcgccatcatcggtgcacggaaatacggcgaccaggaccgtgtgcgggcaggacaacgaaagatccttcttggtgctatcgccttggtggtagcagtaggcattcacccgtgacccacggttaccggaagccccgccgcaatcgataccactgtcagtaccatcaggggcgataggggtcaagctctccttgtcacaatcccttccccggcagcccagtaaccgtcgcttacagccatacatggatatgcgcccattcgtcggcaccgacgccgtgcgggttggcgacgctgacccgtctgctcacaaacgacccttccagcccagcaccacccactacaccgacacgatccacgaagctgaaaccgaacctcccatccccgtccgaaacatcaacgaactcatcaaccccaccaaccatgcatgaacgcacgatcgcctaccggccagccttcctgcgcgacgtgaagcggctcaaaaacaagcactacaacatgaacacacactcaaatgggcggtaaggtcacgaagtcgacgtggctgcctcacggatggcttcggcgagctcttggggtcgactccacatgggccagtggccggttggcagatccatcgcggtgaagttggtcaggtgcgcgacggcgctgaacatcggattgcctgctgcggccagctcgaggacctggacgctgggaatggagcagcagatcaacgtggttagtacatcatggcgagcgctattggacagcgcgacccgtgcccgggccacttgcgcgggttcaggaaccgcccgtgcccggaaccggtcaaggtgctcgttgctgaggccctctaaactggcctgcttgccgagagtatcgaagtcaggaagtggcagctcagctgtttcctcaggtagatctggtgcgaaggcacctccatcgctcatgggaccggagtccacccagacgatccgatggaccaactctgggtgcctgtctacaactaggctcaccggcccgttcgcgccactgtgtcccaccaggaccgcatcgccgcccatctcgtccaggatggctgagatggcgtcagcttggtcgtcgagcgtgcgcgtagtgcgctgggtgtcctccggatcgaggccaggcagcgtcagccccacggctcgactgccagcagtgttcaataactcgactacctcgtcccaagcccaggctccgagccagtaaccaggaacgaggacgataggccgatgctggtcaggtcgcgatgttgaagtcatggagacatagttgcacagtgcgcggacaagggagtggcactatttctggcatgaatttagatctgggtgtccggtgaggcgatcagaacgcctccatgtactgtccgagtgtctacgatgcagcggacacagtcgagcagctggctcacaagtttccaggtgtccttctgcccctatgagggaagtcggctgctctcgcaacctttgagggctgctctggggtcggaaccagttacagatcgttcaagttccgggaactaccgccggtcacgctgattgattcccgggcgatctcgcttctgacgacagtggtcggtaaccgagaggcgtcctactctgaccccgctgctgcggtgagtaaatcacgggcgtcccggatccggccacccgtccaagtgccagccagcttgatcggctaggcatcgtcaaggagcgacgatgaggtgatgatgcgatgtgagcgcaccgcgaagtgaggtataaagaagccttcccgggcgcatgcgtcgcccaggaaggccaggttggcccctggacggctgaatggttgggcggatcaggctgtagcggagacgtgcagtacctcgtaggcgatggcgttggttgggctctggtctgcatcgtggctactgagttcgacgaggatgacggtccaggtggtgatgtcgacggcggtgacgcgggcgatggtggaatcagtggatgctgcaaggaagtcggcggttatgtcttcgatgcagtgggacggagcagtgctggtgggcaggggcacggtcttgacggtcaggcttcgggcagcagagtaatcggcggttccgttaacaagctggtggacggtccagtcctggatcgggtgccggccgaagtcgcgtacgatagccgagtaaccaagttcgccccagcagaactggcgcatcccctctatgtcgcgccagacgtagaagggcgcgtaggagttctggggtgcgcctttgaccttttcttggatgaggtaggccttgaactccagtccatggtagccgtccatgaggtgtccagtctggatgacgcggtcgcggatgatctgcatgtcatagtcggtgggcagggtgatctgatattgcatggcgtacatcagcggttctccttggtttcgtgggagtaggtcgtggggatgacgggttcctgccaatcgatggttgacaagtcgtcggcggcttgttggtaggtaaggtggatcattggctgtttgagtgcagcgccatgccagtgtctctggccggcgtcgatccagatggattcgcccttggtcaggtgctggggtgcttgtccttcaatatggaccagggcaacgccgcccgtgacgtagaggccctgtcccttggggtgtgtgcctcagcggcaaacgtgacggcgtgggcggcacgcccggcgtcttccgtggcacgatcggccggatccatggcggcgcgcagctgctgttctgcagccaggcgtccaggtcacggcgggcagcatcgacacccagggcagcctcgacggcttcagggctacgacgctggccgggctggttgaccgcagaccactggtgccgggcgtcgtccagatcatggccggcggcgtcgatgagggcggtggtggcttcggcgcagcatcgcctgatccactccgaacgtgacaggccagctgtctcggcggcactgtcaatgcgcgccaggagagatttcatgggcgctcatctgtagcctccagataggcgttgatgtagcgcagagcctgatccgtcatgtcgatggcggctgcctcggcagacgacacaacgggctgtggatgataagaccacccaacatagacggcgaacatcaatttctcgacagctttcatgaggtccccggcggcaaccgcatccgcctcatcatccgaggagaaccacttcaggtctgaacggctgtacatagcccctaggtcctgatgtgggtcgaggtccttggaatgatggaagttcctacacacccatcgccaaagacctcaacatggacaacgctaccttcaccactccctcatctgtgaagagccagtttatgcacggtgttgaaagaggcgtcggtctacgacgaatgcgggttaatggtcttgcggtgtggggcgctgggcgatggcatcgagaacgcgtgagtgggtggcgatccattcggccgcgtcggggttgatgttgcgggcgacggtgtcgatcgctgttacgtagtgggcaagcctgcgaatctcagcttgttggtcagggtgatcgctgatgagaggctcttgatgggaggcgcggttacggacgtggcggatgagctccacgttttcctcgaagtcgcgtcggctacgccccgggtagtgaggcatacctccgttacgtaagtcagtgagagctttccatacggttgcttccaggcgcggggtgagcagaaagcgccagttgtccagtgacagactcgccacgatctgatcaggggtcgcatcgagcctcgcgcgccgcagtcgcttctcggccctggcgacgttacgcgggaaaccaccgagccgatagctcggggattcccaccaacgccgtatgccagtatcggcgctcaggcgcacgtcaatgaagtttctcaggagtacctcgacatggctgatgtcttccaagaacgctttcgagatgcgggtgttccacacgtaccacgcatcgactggttcgatccggtagcggctgagcctggcgggtgagaaccactcctgcaacgtctcacgactcaccgtgggagcgtggtaggattgatgacgataggcctcgggaaggtcaatgccgcgaaatatcggtatacccccgaggtcattgttttgcccaggcccctcctcgcatacttgcggggcgtcattggctgccgtcatctcgtctcttcccggtacgtggctgtccatgttcacgggcaggtacggcaatgaggttcccgcacacaaacctctaccaagcatacgctggcaagcccc

SEQ ID NO: 230 - DNA, 7938 bp, Propionibacterium acnes
  source 1..7938: mol_type = genomic DNA
tttgtccacccacccctgtcgattttgtccgccaagtattagacaaaccattagacagtgaattagaccctgggtcgcgtcagcgtgttagctcaccaacgcgcgcgcgcgcggcggccgagccgccgaagccaaagaaacccataccaccaacgcttgaaccagcagcccccgcttcagacagtcctgtgtcagcgcacgctgatgaggctgccgagttggcgtggcggttcgtggggtggtgtcctcagctggtaggggcaccgaagaaggtgcgtggccagctccgtcagctggtcgctgccgagatccgccggaatccgggctggctggatgcgccagcgttggaggttgttgcccagcgggtacgtgctgaaggtgcgctgggggtccagcactgcgagattgtgcgagccgagctgcacggggtgatcgccgaccagaaggccgcccccgcccgccccgacgccctgcacgcgcgggagcccaagtggtgggacgacgtgtactacgaaggaaacacaaccgtgtggacgtacgactctgacgaaaccagtgacgacgacgaggcgtggagccggtcgcaggtatgtcatgttgctgagcgtgacgacatggctggcgggattgctaccaacctgctggcctcccacgctgatgatccgatggcctggctgactcgccgtcaaaccatgctgatggctcgtttcccccacgcccagaacgaggtcatcgcgatgtgccacatcgtgcgcaccgccctggaggccgacatggccgccggaacccggtgggaggactgatgagggtctcccggcgcgccctcatggccgtggcccgtgccgacgctgccgcagcagaccatgccaccggccgatgggtggccacagccaacgccaccgtcgcccggctgaccggactgtgcgaacgcaccgtccaatacgcccgcgccaccctggtccacctgggcctgtgccgcgtcgtggccaccggccgctacctcaccgccgacgagcggcgcacggctgctcgcacccatggcggccgccagatgcgcgccgcctccacccgcgtcctcaccatgtcctgcgcaatcgtttgcgccctaccccgaaggggtcaccactacaggaaagttaagttcctagatggtcaccaacgcacgcgcaggcgcgtgcgaaggccagcaacaccagagaagaaacccctgtggctgcaaaaactcgcagccctcctcgaccagcacctgccctggctggtgagaaaccatcacatcggccgactgtgccacgccctcaccgccctgggcatcgacgaacactggcaacccgcagacctcgacgccctcctcgacgccatgaaccgcaggaaccgtcgcctcggcctcgacgtgccatgcgccgacgaccagcacaaccccttgggactgttcatccaccaggcccgagacaccctcacccacgacaacccccatgaacgccgcctggcccgcgaacaccaccgcgcccaactcatcgacgaccaactccgccgccgcgcagaaaccgccacctgcgcagcccgcctcgcagccgagcacgccgaccccgactaccagacccgccgtcgtgaacgcagggaaaccctgcgagccacactcagggccgcccagcagcatgtcaggacacactgatacccgctcatacgcacaccatgaaacacgacaagccacctgacagtatcagctgcaagacgcatgacaacatagaaggacatgatgaaatacacatagacacaaccccgcacagcagtttcgcaacaaatcatgatagtctcatggcagtatcgcttgatacgcacatagcatcactcccacataggcagttatgctgatatactcctactaggttatccgtccaacatgctgagtgggttcctgtacagcatgaaaggagcatggcatgatatgggccgttctcaactgcaagggtggtgtcggcaagacgaccagtgccctcctgctggcggcagccgccgccaagcagggccacaccaccctggtggccgacgctgacccccagggcaccgcatcccagtggtcagccctggcaaccaaaaacgacgaacccctgcccttcccggtgcaagcggtcaacatcgccaccatggaggcactgcccaccaccaccgacgcccatgatctcatcctcgttgacacacccccctcggcaggcgatctgatgttccaggcatgccgcatcgccgacctcatcatcatccccaccgccacctccggacccgacatctcccgaacatgggtcaccatggacgccacacaaggcacaccacgcgcgatcctcctcacccaaaccgaacacaaccgtgtcgtctaccgccaagctcgcactgccctcgccgccgacgacaccgtcgttctcctggaccacgacatcccccgccgtgaatccatccgcacagcatggggcaccaaccccccagacgacgtcatcacctactacctgcccgtcctcaacgaactcatggaggccctgtcatgaccaccaagaaaaccgacccattcgcccgccagaaagcagcagaagaccgcgcccaccaactccaagacgaagcccaacgccacgcccaccccaaacgcgtcatcggccccaccgcacgattccagttcgtcctgccagccgacgtgctcaccggcctcaaacacctcgccctcacccgcggcaccaccgcccgccaactcaccctcgacgccctcgacaccgcctacggcctcgacaccctcgccaacagcgggaagaaaacccacccatgacccgtgggtccccctgccaccaccccctcgacggcaactgtgtgcgagccacaggcccgcacacaggcggcagcccagtgccgtccccgccaggaaaggaactgaacttttctggagtgctggctccctatcaccccttatggtgctaccagatccagtagcgccagcccgagaggaaacccatgagctacatcgtccgcaccggaaatctagccggcacccccgagctgcgcgaggggtagccgacacggcggaccgtgcccctgacagtaagcggcactactggagacatcaccatgaccgctcagatcctcgccccgtgcaaccagaaggctgccgtcatcgaaggagccctgccatgaaccaacctaccccccacaaggccgacgagtcacagacgagcaacaccacgaggaagtggcggcacaaggtgtcgttctaccaagacccggccgacaccgaccgagtccgcggagcgatcctccacaccatgacaaccgaaggcaaccggaacctgagccagttcgtcaacgatgccgtcatggccaaggtgaccgaactggaagcaaaatacaaccacggcgagccattccccgccgtgggagcccgaggactcacccagggcggcgcagccgccaacagataagagggcggggaccaccaatagcagtcgatttcggatccagatcgggtagacaggacccatgatgaatttcatatcctccctgctctcggccatcctgaccctctttgcgatggtagccgtggcgataggagtggtgaacattgtgccgggaatatgcgccatcatcggtgcacggaaatacggcgaccaggaccgtgtgcgggcaggacaacgaaagatccttcttggtgctatcgccttggtggtagcagtaggcattcacccgtgacccacggttaccggaagccccgccgcaatcgataccactgtcagtaccatcaggggcgataggggtcaagctctccttgtcacaatcccttccccggcagcccagtaaccgtcgcttacagccatacatggatatgcgcccattcgtcggcaccgaagccgtgcgggttggcgacgctgacccgtctgctcacaaacgacccttccagcccagcaccacccactacaccgacacgatccacgaagctgaaaccgaacctcccatccccgtccgaaacatcaacgaactcatcaaccccaccaaccatgcatgaacgcaagatcgcctaccggccagccttcctgcgcgacgtgaagcggctcaaaaacaagcactacaacatgaacacacactcaaatgggcggtaaggtcacgaagtcgacgtggctgcctcacggatggcttcggcgagctcttggggtcgactccacatgggccagtggccggttggcagatccatcgcggtgaagttggtcaggtgcgcgacggcgctgaacatcggattgcctgctgcggccagctcgaggacctggacgctgggaatggagcagcagatcaacgtggttagtacatcatggcgagcgctattggacagcgcgacccgtgcccgggccacttgcgcgggttcaggaaccgcccgtgcccggaaccggtcaaggtgctcgttgctgaggccctctaaactggcctgcttgccgagagtatcgaagtcaggaagtggcagctcagctgtttcctcaggtagatctggtgcgaaggcacctccatcgctcatgggaccggagtccacccagacgatccgatggaccaactctgggtgcctgtctacaactaggctcaccggcccgttcgcgccactgtgtcccaccaggaccgcatcgccgcccatctcgtccaggatggctgagatggcgtcagcttggtcgtcgagcgtgcgcgtagtgcgctgggtgtcctccggatcgagacctggcagcgtcagccccacggctcgactgccagcagtgttcaataactcgactacctcgtcccaagcccaggctccgagccagtaaccaggaacgaggacgataggccgatgctggtcaggtcgcgatgttgaagtcatggagacatagttgcacagtgcgcggacaagggagtggcactatttctggcatgaatttagatctgggtgtccggtgaggcgatcagaacgcctccatgtactgtccgagtgtctaggatgcagcggacacagtcgagcagctggctcacaagtttccaggtgtccttctgcccctatgagggaagtcggctgctctcgcaacctttgagggctgctctggggtcggaaccagttacagatcgttcaagttccgggaactaccgccggtcacgctgattgattcccgggcgatctcgcttctgacgacagtggtcggtgaccgagaggagtcctactctgaccccgctgctgcggtgagtaaatcacgggcgtcccggatccggccacccgtccaagtgccagccagcttgatcggctaggcatcgtcaaggagcgacgatgaggtgatgatgcgatgtgagcgcaccgcgaagtgaggtataaagaagccttcccgggcgcatgcgtcgcccaggaaggccaggttggcccctggacggctgaatggttgggcggatcaggctgtagcggagacgtgcagtacctcgtaggcgatggcgttggttgggctctggtctgcatcgtggctactgagttcgacgaggatgacggtccaggtggtgatgtcgacggcggtgacgcgggcgatggtggaatcagtggatgctgcaaggaagtcggcggttatgtcttcgatacagtgggacggagcagtgctggtgggcaggggcacggtcttgacggtcaggcttcgggcagcagagtaatcggcggttccgttaacaagctggtggacggtccagtcctggatcgggtgccggccgaagtcgcgtacgatagccgagtaaccaagttcgccccagcagaactggcgcatcccctctatgtcgcgccagacgtagaagggcgcgtaggagttctggggtgcgcctttgaccttttcttggatgaggtaggccttgaactccagtccatggtagccgtccatgaggtgtccagtctggatgacgcggtcgcggatgatctgcatgtcatagtcggtgggcagggtgatctgatattgcatggcgtacatcagcggttctccttggtttcgtgggagtaggtcgtgggggtgacgggttcctgccaatcgatggttgacaagtcgtcggcggcttgttggtaggtaaggtggatcattggctgtttgagtgcagcgccatgccagtgtctctggccggcgtcgatccagatggattcgcccttggtcaggtgctggggtgcttgtccttcaatatggaccagggcaacgccgcccgtgacgtagaggccctgtcccttggggtgtgtgtgcctcagcggcaaacgtgacggcgtgggcggcacgcccggcgtcttccgtggcacgatcggccggatccatggcggcgcgcagctgctgttctgcagccaggcgtccaggtcacggcgggcagcatcgacacccagggcagcctcgacggcttcagggctacgacgctggccgggctggttgaccgcagaccactggtgccgggcgtcgtccagatcatggccggcggcgtcgatgagggcggtggtggcttcggcgcagcatcgcctgatccactccgaacgtgacaggccagctgtctcggcggcactgtcaatgcgcgccaggagagatttcatgggcgctcatctgtagcctccagataggcgttgatgtagcgcagagcctgatccgtcatgtcgatggcggctgcctcggcagacgacacaacgggctgtggatgataagaccacccaacatagacggcgaacatcaatttctcgacagctttcatgaggcccccggcggcaaccgcatccgcctcatcatccgaggagaaccacttcaggtctgaacggctgtacatagcccctaggtcctgatgtgggtcgaggtccttggaatgatggaagttcctacacacccatcgccaaagacctcaacatggacaacgctaccttcaccactccctcatctgtgaagagccagtttatgcacggtgttgaaagaggcgtcggtctacgacgaatgcgggttaatggtcttgcggtgtggggcgctgggcgatggcatcgagaacgcgtgagtgggtggcgatccattcggccgcgtcggggttgatgttgcgggcgacggtgtcgatcgctgttacgtagtgggcaagcctgcgaatctcagcttgttggtcagggtgatcgctgatgagaggctcttgatgggaggcgcggttacggacgtggcggatgagctccacgttttcctcgaagtcgcgtcggctacgccccgggtagtgaggcatacctccgttacgtaagtcagtgagagctttccatacggttgcttccaggcgcggggtgagcagaaagcgccagttgtccagtgacagactcgccacgatctgatcaggggtcgcatcgagcctcgcgcgccgcagtcgcttctcggccctggcgacgttacgcgggaaaccaccgagccgatagctcggggattcccaccaacgccgtatgccagtatcggcgctcaggcgcacgtcaatgaagtttctcaggagtacctcgacatggctgatgtcttccaagaacgctttcgagatgcgggtgttccacacgtaccacgcatcgactggttcgatccggtagcggctgagcctggcgggtgagaaccactcctgcaacgtctcacgactcaccgtgggagcgtggtaggattgatgacgataggcctcgggaaggtcaatgccgcgaaatatcggtatacccccgaggtcattgttttgcccaggcccctcctcgcatacttgcggggcgtcattggctgccgtcatctcgtctcttcccggtacgtggctgtccatgttcacgggcaggtacggcaatgaggttcccgcacacaaacctctaccaagcatacgctggcaagccccgacgagacgacgcctccgcccgccacaccaacggtcaccgccacggccacggtgaccgtgaccgtggcaccg

SEQ ID NO: 231 - DNA, 770 bp, Propionibacterium acnes
  source 1..770: mol_type = genomic DNA
taggcgccccttcggggcacctgtaagcctgtattgctgcggtttacagccttggcacccaaaggggcggcaaggggccaggaggggtcattctgcgccgctgatggcatctcacatgtgagttattctctcaactatcctttaagtcaagcgtattagattatttatccagtactcttgacagtctgtctatcgggctatatatttataagcagaacgagagatcgggaaaggaatcaacgatgaagtacaccgcacacgtcaacatggtgaccaagccctacatcggacttcccactacccgaaccccctacaccctcgtcgacgccgactgggccacaacatggatgatcgacgaaacctacgaagcccactaccacggcaccagcatggagatcagcatctacggcgaaggccccgactgctccgtactcaccaaccgcatctacaccgaccagcccaccgatgtgaccgctgcactcgccggctacggcttcaccatcgacaccaccaacacatccaaaaccatcctcacgctcacccgcacagccaccatctcccacctactagccatcctcgatggcctaccccaagctgaggggactcactggctcaacactcaacccgacctccaccacatcaccctcgacgactccaccaccggctgggccaccaaccgcaccgacgacaccgacaccggcgtctgctacgacaccagcacccacaactggcagatctgctgacagcatgacgggcctgcccttgaaggg

SEQ ID NO: 232 - DNA, 504 bp, Propionibacterium acnes
  source 1..504: mol_type = genomic DNA
ttcatgatcgcagtgcccgatacaaggtggagcggcccacaccaagctgggccgccaccttcgttttcgggacaccctcggcaacgaggcggcgagcgcgggcaagctggccctcgctcaatgccggtttccggcctcgatagcggccctgcttcttcgccaccgcgatcccctcggcctgtcgttcatggatcaacgcccgctcgaactcggccaaggcacccagcagatgcaacatgagctggctcaccggatcagcggaccccggcccatagacctgacccccttcaagggcaggcccgtcatgctgtcagcagatctgccagttgtgggtgctggtgtcgtagcagacgccggtgtcggtgtcgtcggtgcggttggtggcccagccggtggtggagtcgtcgagggtgatgtggtggaggtcgggttgagtgttgagccagtgagtcccctcagcttggggtaggccatcgaggatggctagtaggtgggagatggtgg

SEQ ID NO: 233 - DNA, 6850 bp, Propionibacterium acnes
  source 1..6850: mol_type = genomic DNA
attttgtccacccacccctgtcgattttgtccgccaaatattagacaaaccattagacagtgaattagaccctgggtcgcgtcagcgtgttagctcaccaacgcgcgcgcgcgcggcggccgagccgccgaagccaaagaaacccataccaccaacgcctgaaccagcagcccccgcttcagacagtcctgtgtcagcgcacgctgatgaggctgccgagttggcgtggcggttcgtggggtggtgtcctcagctggtaggggcaccgaagaaggtgcgtggccagctccgtcagctggtcgctgccgagatccgccggaatccgggctggctggatgcgccagcgttggaggttgttgcccagcgggtacgtgctgaaggtgcgctgggggtccagcactgcgagattgtgcgagccgagctgcacggggtgatcgccgaccagaaggccgcccccgcccgccccgacgccctgcacgcgcgggagcccaagtggtgggacgacgtgtactacgaaggaaacacaaccgtgtggtacgactctgacgaaaccagtgacgacgacgaggcgtggaaccggtcgcaggtatgtcatgttgctgagcgtgacgacatggctggcgggattgctaccaacctgctggcctcccacgctgatgatccgatggcctggctgactcgccgtcaaaccatgctgatggctcgtttcccccacgcccagaacgaggtcatcgcgatgtgccacatcgtgcgcaccgccctggaggccgacatggccgccggaacccggtgggaggactgatgagggtctcccggcgcgccctcatggccgtggcccgtgccgacgctgccgcagcagaccatgccaccggccgatgggtggtcacagccaacgccaccgtcgcccggctgaccggactgtgcgaacgcaccgtccaatacgcccgcgccaccctggtccacctgggcctgtgccgcgtcgtggccaccggccgctacctcaccgccgacgagcggcgcacggctgctcgcacccatggcggccgccagatgcgcgccgcctccacccgcgtcctcaccatgtcctgcgcaatcgtttgcgccctaccccgaaggggtcaccactacaggaaagttaagttcctagatggtcaccaacgcacgcgcaggcgcgtgcgaaggccagcaacaccagagaagaaacccctgtggctgcaaaaactcgcagccctcctcgaccagcacctgccctggctggtgagaaaccatcacatcggccgactgtgccacgccctcaccgccctgggcatcgacgaacactggcaacccgcagacctcgacgccctcctcgacgccctcctcgacgccatgaaccgcaggaaccgtcgcctcggcctcgacgtgccatgcgccgacgaccagcacaaccccttgggactgttcatccaccaggcccgagacaccctcacccacgacaacccccatgaacgccgcctggcccgcgaacaccaccgcgcccaactcatcgacgaccaactccgccgccgcgcagaaaccgccacctgcgcagcccgcctcgcagccgagcacgccgaccccgactaccagacccgccgtcgtgaacgcagggaaaccctgcgagccacactcagggccgcccagcagcatgtcaggacacactgatacccgctcatacacacaccatgaaacacgacaagccacctgacagtatcagctgcaagacgcatgacaacatagaaggacatgatgaaatacacatagacacaaccccgcacagcagtttcgcaacaaatcatgatagtctcatggcagtatcgcttgatacacacatagcatcactcccacataggcagttatgctgatatactcctactaggttatccgtccaacatgctgagtgggttcctgtacagcatgaaaggagcatggcatgatatgggccgttctcaactgcaagggtggtgtcggcaagacgaccagtgccctcctgctggcggcagccgccgccaagcagggccacaccaccctggtggccgacgctgacccccagggcaccgcatcccagtggtcagccctggcaaccaaaaacgacgaacccctgcccttcccggtgcaagcggtcaacatcgccaccatggaggcactgcccaccaccaccgacgcccatgatctcatcctcgttgacacacccccctcggcaggcgatctgatgttccaggcatgccgcatcgccgacctcatcatcatccccaccgccacctccggacccgacatctcccgaacatgggtcaccatggacgccacacaaggcacaccacgcgcgatcctcctcacccaaaccgaacacaaccgtgtcgtctaccgccaagctcgcactgccctcgccgccgacgacaccgtcgttctcctggaccacgacatcccccgccgtgaatccatccgcacagcatggggcaccaaccccccagacgacgtcatcacctactacctgcccgtcctcaacgaactcatggaggccctgtcatgaccaccaagaaaaccgacccattcgcccgccagaaagcagcagaagaccgcgcccaccaactccaagacgaagcccaacgccacgcccaccccaaacgcgtcatcggccccaccgcacgattccagttcgtcctgccagccgacgtgctcaccggcctcaaacacctcgccctcacccgcggcaccaccgcccgccaactcaccctcgacgccctcgacaccgcctacggcctcgacaccctcgccaacagcgggaagaaaacccacccatgacccgtgggtccccctgccaccaccccctcgacggcaactgtgtgcgagccacaggcccgcacacaggcggcagcccagtgccgtccccgccaggaaaggaactgaacttttctggagtgctggctccctatcaccccttatggtgctatcagatccagtagcgccagcccgagaggaaacccatgagctacatcgtccgcaccggaaatctagccggcacccccgagctgcgcgaggggtagccgacacggcggaccgtgcccctgacagtaagcggcactactggagacatcaccatgaccgctcagatcctcgccccgtgcaaccagaaggctgccgtcatcgaaggagccctgccatgaaccaacctaccccccacaaggccgacgagtcacagacgagcaacaccacgaggaagtggcggcacaaggtgtcgttctaccaagacccggccgacaccgaccgagtccgcggagcgatcctccacaccatgacaaccgaaggcaaccggaacctgagccagttcgtcaacgatgccgtcatggccaaggtgaccgaactggaagcaaaatacaaccacggcgagccattccccgccgtgggagcccgaggactcccccagggcggcgcagccgccaacagataagagggcggggaccaccaatagcagtcgatttcggatccagatcgggtagacaggacccatgatgaatttcatatcctccctgctctcggccatcctgactctctttgcgatggtagccgtggcgataggagtggtgaacattgtgccgggaatatgcgccatcatcggtgcacggaaatacggcgaccaggaccgtgtgcgggcaggacaacgaaagatccttcttggtgctatcgccttggtggtagcagtaggcattcacccgtgacccacggttaccggaagccccgccgcaatcgataccactgtcagtaccatcaggggcgataggggtcaagctctccttgtcacaatcccttccccggcagcccagtaaccgtcgcttacagccatacatggatatgcgcccattcgtcggcaccgacgccgtgcgggttggcgacgctgacccgtctgctcacaaacgacccttccagcccagcaccacccactacaccgacacgatccacgaagctgaaaccgaacctcccatccccgtccgaaacatcaacgaactcatcaaccccaccaaccatgcatgaacgcacgatcgcctaccggccagccttcctgcgcgacgtgaagcggctcaaaaacaagcactacaacatgaacacacactcaaatgggcggtaaggtcacgaagtcgacgtggctgcctcacggatggcttcggcgagctcttggggtcgactccacatgggccagtggccggttggcagatccatcgcggtgaagttggtcaggtgcgcgacggcgctgaacatcggattgcctgctgcggccagctcgaggacctggacgctgggaatggagcagcagatcaacgtggttagtacatcatggcgagcgctattggacagcgcgacccgtgcccgggccacttgcgcgggttcaggaaccgcccgtgcccggaaccggtcaaggtgctcgttgctgaggccctctaaactggcctgcttgccgagagtatcgaagtcaggaagtggcagctcagctgtttcctcaggtagatctggtgcgaaggcacctccatcgctcatgggaccggagtccacccagacgatccgatggaccaactctgggtgcctgtctacaactaggctcaccggcccgttcgcgccactgtgtcccaccaggaccgcatcgccgcccatctcgtccaggatggctgagatggcgtcagcttggtcgtcgagcgtgcgcgtagtgcgctgggtgtcctccggatcgaggccaggcagcgtcagccccacggctcgactgccagcagtgttcaataactcgactacctcgtcccaagcccaggctccgagccagtaaccaggaacgaggacgataggccgatgctggtcaggtcgcgatgttgaagtcatggagacatagttgcacagtgcgcggacaagggagtggcactatttctggcatgaatttagatctgggtgtccggtgaggcgatcagaacgcctccatgtactgtccgagtgtctacgatgcagcggacacagtcgagcagctggctcacaagtttccaggtgtccttctgcccctatgagggaagtcggctgctctcgcaacctttgagggctgctctggggtcggaaccagttacagatcgttcaagttccgggaactaccgccggtcacgctgattgattcccgggcgatctcgcttctgacgacagtggtcggtaaccgagaggcgtcctactctgaccccgctgctgcggtgagtaaatcacgggcgtcccggatccggccacccgtccaagtgccagccagcttgatcggctaggcatcgtcaaggagcgacgatgaggtgatgatgcgatgtgagcgcaccgcgaagtgaggtataaagaagccttcccgggcgcatgcgtcgcccaggaaggccaggttggcccctggacggctgaatggttgggcggatcaggctgtagcggagacgtgcagtacctcgtaggcgatggcgttggttggggtctggtctgcatcgtggctactgagttcgacgaggatgacggtccaggtggtgatgtcgacggcggtgacgcgggcgatggtggaatcagtggatgctgcaaggaagtcggcggttatgtcttcgatgcagtgggacggagcagtgctggtgggcaggggcacggtcttgacggtcaggcttcgggcagcagagtaatcggcggttccgttaacaagctggtggacggtccagtcctggatcgggtgccggccgaagtcgcgtacgatagccgagtaaccaagttcgccccagcagaactggcgcatcccctctatgtcgcgccagacgtagaagggcgcgtaggagttctggggtgcgcctttgaccttttcttggatgaggtaggccttgaactccagtccatggtagccgtccatgaggtgtccagtctggatgacgcggtcgcggatgatctgcatgtcatagtcggtgggcagggtgatctgatattgcatggcgtacatcagcggttctccttggtttcgtgggagtaggtcgtgggggtgacgggttcctgccaatcgatggttgacaagtcgtcggcggcttgttggtaggtaaggtggatcattggctgtttgagtgcagcgccatgccagtgtctctggccggcgtcgatccagatggattcgcccttggtcaggtgctggggtgcttgtccttcaatatggaccagggcaacgccgcccgtgacgtagaggccctgtcccttggggtgtgtgcctcagcggcaaacgtgacggcgtgggcggcacgcccggcgtcttccgtggcacgatcggccggatccatggcggcgcgcagctgctgttctgcagccaggcgtccaggtcacggcgggcagcatcgacacccagggcagcctcgacggcttcagggctacgacgctggccgggctggttgaccgcagaccactggtgccgggcgtcgtccagatcatggccggcggcgtcgatgagggcggtggtggcttcggcgcagcatcgcctgatccactccgaacgtgacaggccagctgtctcggcggcactgtcaatgcgcgccaggagagatttcatgggcgctcatctgtagcctccagataggcgttgatgtagcgcagagcctgatccgtcatgtcgatggcggctgcctcggcagacgacacaacgggctgtggatgataagaccacccaacatagacggcgaacatcaatttctcgacagctttcatgaggtccccggcggcaaccgcatccgcctcatcatccgaggagaaccacttcaggtctgaacggctgtacatagcccctaggtcctgatgtgggtcgaggtccttg

SEQ ID NO: 234 - DNA, 6142 bp, Propionibacterium acnes
  source 1..6142: mol_type = genomic DNA
atctgctgacagcataacgggcctgcccttgaagggttggactctgcacccatttcagccgggtacgttgccggctgggcgaaggaagcagacggcgccgcgattgaagctgccgccgagcacgtcgcgaagacctcccacgcgattgccgaggcgttgcagctcaccgcacagtgagccccacggggcgaccggctcaccccggtcgcccctcaccccccgacaggggaaccgttcccgccgcctgaatctccatacccctgatacgtactacgcggggtcgaggagtggactcccccaccctcgtgtagtacactatactacacagtcattgaggatagaggtgacgtcatgagtttttcgatccgtttaaccgaccatgagcgccgcttagctgattcctacgcccgcctgcactcgcagtccctgagtgaggctttcaagcaagccctcttcgaccgcatcgccgacgagttcgatctgcaagtagcccgtgaggcactcaccgactacgcccgcgacaactaccagtctcgccccatcagcgagctatgggacgagtgtgacctatgagctggcagatcgaaaccacgagccggttcgataaagaattcaaaaagctagaccgctacacccaaaaactcattcacggctggatcacgaaaaacatcgacaacaccgacgatccccgccgccacggcaagcccctcaccggtgatctttccggactgtggcgctaccgcatcggcgactaccgcctcatctgcacactcaacgataaccgcctcaccatcctcgccctgtccatcggtcaccgccgcgacatctaccgataagccgttgcaagactgcggcgtcgacaccgccgggaccctggcccaggccttgggcctggaggaggacgagagcgaggagcacgccgcctgagcggtcgccggcacttcccataacagcaccggtcccggcggcccggccccgcgtctggtgctcggaccgatgccggcgcctggcctccgacgcccgccggggccagcggctgggctacctcgacgtcgacgtacaacgggccgaacgaaccgtgcgctgatttaccaccgcttccgcacagagaacatgcctctgactaggagaaatgacgttttccacagggcctctattactaatatccctattatctctatccacgcgcgcgagcctcagcgttcaagcttcaggtcttgctcgtctccctcgcgcctcgctgcgctcgttgctactgccgccccacccggcaagccgggtgggttgccatcggaataccgtggaccatcccggcgcatacacccagacggtccaagatccaatccacgctcacccgcgacgccgctaacgatcctcatacaccgtagatgccgttctgagagccttccagacccgcacgtgggtttattgcaccgagacccaaatcccctcagaagcgatcctgaaaccgtctacgccccatttccgacggacgctggacaggctgggcggcttgtctcccgccgcagacatggccctggcatatgcggttgccgactggtgggatcagggattggatcacacggcagacggctggtccaaggcgggtgtgcaggtgcggtgagcggcagacgtgaccggtggggtgcactgtcatggccgggcatctgccgagccaccatgcgggccctggaccaggaggcagcccgctgcgaggactgggggaagacggcggcacggatgggccgtcgggatgcggcggccggattcaccgagactgcggtgcagcatcgtggacagatgcaccacctcatgtcggcacaaaaagtgtgggtgtcgaccgacatggtgtcggctacactggacgccgcaggagacgtgccgagtttcgaggccgtcgacgtccctgccgccgggctcatgggtttggccagccccctgccgccggttaccctgcagcatccgctgtatctgcgcagcgacgagggtgtgacaaccttcactgatccggttctcgtcgacgcgctgggatggtggatggattctgggcgtgtgcacgtggtgatgtgcacacgcacaccccggctgcccaacccggtttatgcggtggcctccccactgacggtggtggagaaaatcacggtgcccaccggcatcgagttcgagaccatggagtccaggatcctgacccccggcggcgtgacaggcgtctcacggcagggcacacgcatgatgatccggttggcgtcatggctgggtgccgcgtgggtgctcatggcgactccgacggtgtcggagccgcaccctatggatggccggtggggaggcccagcaacggggcagacccggccgcgtgatcgggtgaccgtggtcgacatgcggcccatgaggcaggtgcacaccaccaccgaccccaccggcaggcggttgacgacccggcatgtcgtgcgaggacactggacacaccaaccctacggcccggcccgcagtctccgacgcctgcagtgggtcgccccattcatccgcggccccgaaggggctccgttcgtcggcaccgacaccgtcaccgtatggcgccgctagatacgcgggcgcggggggttgacgaacgatgcccccctctttgtgttgtgatcagtcgtgatcggcgggttttaggtcggggtaggtgtcgagaatggccttgaggacgaggtcttggattgtggtgtcattctgggctgccttgaccttcagtccaacgccgatgtcccgggggattctggtctgcaacttgaacaggtctgcctccttggttttgaacagtttggctgcagggttggcaacgggctgttcttggcgctggcgtccaaggttgcttttctttcgggcggtcatgacatcatctccaacagttcgtcggcaacatcggcgaagaaggcgatagtttccggctcaggggtacagccgtaggcgcgcttgatgacttgacgcttggggatgacgtgatcgaccaactgcgtctgggagtcgttggctagaaggtcgcgaccttccttgaacagggaggtattcggttcagctttggaaagcagcaccacgcgcggggttcctgcggcggcgtcgtgcgtctcccaggtgcgcgccatgtcgagcccggacgtgtcggtggggatgataaccagatcggcggcgcgaatggcggcggtgatgatgtcaccgttgcccggcggggtgtcaatgatgacaacttcttcgggtccggcgacgaggtgctggagcgtcgccttgttggccggttccacggggaaccccaaggggtcggcgttactcagtgtgcactcggcccaggatgatgctgacccttgagggtcggcatctttgacgcggaccatacggcccgtctcatggagagctgcagccagcaggatcgctgccgtggtcttaccgacgccacccttggcgttgataatgctccagatcatggtgacacctttcagtgaggatgcatatcagtttacctgcaaggagtaaagacggcaagcagttatgccgtttctgcggcaagccgtcttgcatccttggatgtatagatagttgtctacttatggttgtggatcgtggtgtctcgtaccaggatttagtgtgctcgctgatatgcacgactttcgggcggcctgatctggcggtggtgccactaacccaggagtctgatccgcaaggtgtcctcgactttgaggaaggggtctctgctttcgtgttgacctaaagtcaacggccctgggcgatcactgaatcctaataactttgtatccttccctgattgcatcttagcatccttgaattcaaacagggatggagccatgctgttttgacgacatggatgcactggggtttggttgttgccgatgcggagcgtcaggcggcccgggacgccgccaccgccgacacgctgcgggagatcgtgggactgctgggccggggcggcgaggtcccgcccgccaagacggggcgtaagacgaccggcaggccggccccggcccgcaagtcgtcggccacgcagtaaaggcagggatccgtccctacgcagagagcggaggcagatcctgggggatccgactcttcggttccgtgatcttcccggagatcttcccggatcccccagggctcatcctgatacggggtccgccgacggaccccgtatcagtgggggcgctgccaccagtgatggcgggcgggtcggtcggcgtctaggccccgcccgatggtcgcctggtctacctcgcaggcccgtgctgttgccgaggccgagaacgtctgcccacttgttgccgattcagtcccctctccgtctgccatgtcgccaacctttcctatctggcgtgctcatggacatgcccgggcacgccctcgctgctcagaggcctgctcgttccacctctggccgcgaaccgtatttctgctgaccactcctcgtgcgtgaatatttgccagccttggccattcatatttggactactctgcaccagatatcggactgggaaacctcttgcacatctctaattgtcatctattcgttgggcgcgcgctgttagatcgtgatcataccaatcagaagacaaagcgacgcccttttgagcggcttttcgaacgattctagaccgcgctatatcagcatttctaccgcgcggccagagtgctacactaaattcctctctgcaatccttaagtccattctttacttcctcatccaatttctgcgacagcatttttatggaagcatcgcactctgactcatcatcaaatgcctcaattgcgtgcgttcgccattcacggcgcgtattatcgtagccgtaatgaagtattacccaccgatccacagaatcatcgttaggatctacaactgtcatgaatggcccaactctcgctctggtgtattctcaattgcagttcagtgactttacttgaccagtcccggatttagtagacgtagacggagagtaccccgccgggaacttgactgacatcactgctgtaccgtactgctttcccgggtggcaaccatcgtaagcagcatttgccgtgacgtacctagtgctctttctctgagtgccggtaatcgccttatatggtacaggtgggtgaatcgtagccgttacggctaccgatgacacgtttgcatcacatgaagctgtggcgacataattagttgtcccattgacatgatgagagtcgtggacatactgtcgaggatcgagagtgcaggttattgttgacgccgttgttctggtaccagctgctttcgagctctttgttgcagttacagtctgcggccctgaaggttttactgacgcgactgatgtgttcgcgtgttttgcggcagtgctttgatttggttgtgcttgtgtagcagttgctgatgtcgccagtgatgcccccattaccatagctgtgattatggcgtagtctttacgcttcattgcgcccccaaataagcatgttagtttgctattttgaataggatacgagacatcgccatgacttgtcaagggcagaagtagaaagaatcggggggtatcaagaaagatgtgctttcatcaggacgaaagcggatgggtccgttcgacttggtgacgaatgatccggccttgcgtcgcggagaccaggccggcgagtttgtcgagcagggccgccgtggcctcatcgtcgggcacatcactaaagggacgaacaaccatgacggctagggccagaaacgaccggaactgaatcgcatgtggacccccatctggcaccaggcacacacctaccgaccggaaaccctgcaccctgtcgctcccagttcacctcctaatatgcgcctatagtctgtgctagtagacattattttgtgtgttgtttcccatctggcatgtctggccccggacccgccgcgacacgcggtggtggataacagaccaggacccccggaccatagagaccagggggacgagacagtcccccggtgaggatgtctcgatgtgcagatcaggaacagaatcgccgggcacgacccggcgccggtgccggtgcagtgaacccgtggcccatcgactccacgaacgaacgtctcgccttcctcaactggtgttggcggcaaggctactcagcagccatcgtggaa

SEQ ID NO: 235 - DNA, 5731 bp, Propionibacterium acnes
  source 1..5731: mol_type = genomic DNA
tgcgctgatttaccaccgcttccgcacagagaacatgcctctgactaggagaaatgacgttttccacagggcctctattactaatatccctattatctctatccacgcgcgcgagcctcagcgttcaagcttcaggtcttgctcgtctccctcgcgcctcgctgcgctcgttgctactgccgccccacccggcaagccgggtgggttgccatcggaataccgtggaccatcccggcgcatacacccagacggtccaagatccaatccacgctcacccgcgacgccgctaacgatcctcatacaccgtagatgccgttctgagagccttccagacccgcacgtgggtttattgcaccgagacccaaatcccctcagaagcgatcctgaaaccgtctacgccccatttccgacggacgctggacaggctgggcggcttgtctcccgccgcagacatggccctggcatatgcggttgccgactggtgggatcagggattggatcacacggcagacggctggtccaaggcgggtgtgcaggtgcggtgagcggcagacgtgaccggtggggtgcactgtcatggccgggcatctgccgagccaccatgcgggccctggaccaggaggcagcccgctgcgaggactgggggaagacggcggcacggatgggccgtcgggatgcggcggccgaattcaccgagactgcggtgcagcatcgtggacagatgcaccacctcatgtcggcacaaaaagtgtgggtgtcgaccgacatggtgtcggctacactggacgccgcaggagacgtgccgagtttcgaggccgtcgacgtccctgccgccgggctcatgggtttggccagccccctgccgccggttaccctgcagcatccgctgtatctgcgcagcgacgagggtgtgacaaccttcactgatccggttctcgtcgacgcgctgggatggtggatggattctgggcgtgtgcacgtggtgatgtgcacacgcacaccccggctgcccaacccggtttatgcggtggcctccccactgacggtggtggagaaaatcacggtgcccaccggcatcgagttcgagaccatggagtccaggatcctgacccccggcggcgtgacaggcgtctcacggcagggcacacgcatgatgatccggttggcgtcatggctgggtgccgcgtgggtgctcatggcgactccgacggtgtcggagccgcaccctatggatggccggtggggaggcccagcaacggggcagacccggccgcgtgatcgggtgaccgtggtcgacatgcggcccatgaggcaggtgcacaccaccaccgaccccaccggcaggcggttgacgacccggcatgtcgtgcgaggacactggacacaccaaccctacggcccggcccgcagtctccgacgcctgcagtgggtcgccccattcatccgcggccccgaaggggctccgttcgtcggcaccgacaccgtcaccgtatggcgccgctagatacgcgggcgcggggggttgacgaacgatgcccccctctttgtgttgtgatcagtcgtgatcggcgggttttaggtcggggtaggtgtcgagaatggccttgaggacgaggtcttggattgtggtgtcattctgggctgccttgaccttcagtccaacgccgatgtcccgggggattctggtctgcaacttgaacaggtctgcctccttggttttgaacagtttggctgcagggttggcaacgggctgttcttggcgctggcgtccaaggttgcttttctttcgggcggtcatgacatcatctccaacagttcgtcggcaacatcggcgaagaaggcgatagtttccggctcaggggtacagccgtaggcgcgcttgatgacttgacgcttggggatgacgtgatcgaccaactgcgtctgggagtcgttggctagaaggtcgcgaccttccttgaacagggaggtattcggttcagctttggaaagcagcaccacgcgcggggttcctgcggcggcgtcgtgcgtctcccaggtgcgcgccatgtcgagcccggacgtgtcggtggggatgataaccagatcggcggcgcgaatggcggcggtgatgatgtcaccgttgcccggcggggtgtcaatgatgacaacttcttcgggtccggcgacgaggtgctggagcgtcgccttgttggccggttccacggggaaccccaaggggtcggcgttactcagtgtgcactcggcccaggatgatgctgacccttgagggtcggcatctttgacgcggaccatacggcccgtctcatggagagctgcagccagcaggatcgctgccgtggtcttaccgacgccacccttggcgttgataatgctccagatcatggtgacacctttcagtgaggatgcatatcagtttacctgcaaggagtaaagacggcaagcagttatgccgtttctgcggcaagccgtcttgcatccttggatgtatagatagttgtctacttatggttgtggatcgtggtgtctcgtaccaggatttagtgtgctcgctgatatgcacgactttcgggcggcctgatctggcggtggtgccactaacccaggagtctgatccgcaaggtgtcctcgactttgaggaaggggtctctgctttcgtgttgacctaaagtcaacggccctgggcgatcactgaatcctaataactttgtatccttccctgattgcatcttagcatccttgaattcaaacagggatggagccatgctgttttgacgacatggatgcactggggtttggttgttgccgatgcggagcgtcaggcggcccgggacgccgccaccgccgacacgctgcgggagatcgtgggactgctgggccggggcggcgaggtcccgcccgccaagacggggcgtaagacgaccggcaggccggccccggcccgcaagtcgtcggccacgcagtaaaggcagggatccgtccctacgcagagagcggaggcagatcctgggggatccgactcttcggttccgtgatcttcccggagatcttcccggatcccccagggctcatcctgatacggggtccgccgacggaccccgtatcagtgggggcgctgccaccagtgatggcgggcgggtcggtcggcgtctaggccccgcccgatggtcgcctggtctacctcgcaggcccgtgctgttgccgaggccgagaacgtctgcccacttgttgccgattcagtcccctctccgtctgccatgtcgccaacctttcctatctggcgtgctcatggacatgcccgggcacgccctcgctgctcagaggcctgctcgttccacctctggccgcgaaccgtatttctgctgaccactcctcgtgcgtgaatatttgccagccttggccattcatatttggactactctgcaccagatatcggactgggaaacctcttgcacatctctaattgtcatctattcgttgggcgcgcgctgttagatcgtgatcataccaatcagaagacaaagcgacgcccttttgagcggcttttcgaacgattctagaccgcgctatatcagcatttctaccgcgcggccagagtgctacactaaattcctctctgcaatccttaagtccattctttacttcctcatccaatttctgcgacagcatttttatggaagcatcgcactctgactcatcatcaaatgcctcaattgcgtgcgttcgccattcacggcgcgtattatcgtagccgtaatgaagtattacccaccgatccacagaatcatcgttaggatctacaactgtcatgaatggcccaactctcgctctggtgtattctcaattgcagttcagtgactttacttgaccagtcccggatttagtagacgtagacggagagtaccccgccgggaacttgactgacatcactgctgtaccgtactgctttcccgggtggcaaccatcgtaagcagcatttgccgtgacgtacctagtgctctttctctgagtgccggtaatcgccttatatggtacaggtgggtgaatcgtagccgttacggctaccgatgacacgtttgcatcacatgaagctgtggcgacataattagttgtcccattgacatgatgagagtcgtggacatactgtcgaggatcgagagtgcaggttattgttgacgccgttgttctggtaccagctgctttcgagctctttgttgcagttacagtctgcggccctgaaggttttactgacgcgactgatgtgttcgcgtgttttgcggcagtgctttgatttggttgtgcttgtgtagcagttgctgatgtcgccagtgatgcccccattaccatagctgtgattatggcgtagtctttacgcttcattgcgcccccaaataagcatgttagtttgctattttgaataggatacgagacatcgccatgacttgtcaagggcagaagtagaaagaatcggggggtatcaagaaagatgtgctttcatcaggacgaaagcggatgggtccgttcgacttggtaacgaatgatccggccttgcgtcgcggagaccaggccggcgagtttgtcgagcagggccgccgtggcctcatcgtcgggcacatcactaaagggacgaacaaccatgacggctagggccagaaacgaccggaactgaatcgcatgtggacccccatctggcaccaggcacacacctaccgaccggaaaccctgcaccctgtcgctcccagttcacctcctaatatgcgcctatagtctgtgctagtagacattattttgtgtgttgtttcccatctggcatgtctggccccggacccgccgcgacacgcggtggtggataacagaccaggacccccggaccatagagaccagggggacgagacagtcccccggtgaggatgtctcgatgtgcagatcaggaacagaatcgccgggcacgacccggcgccggtgccggtgcagtgaacccgtggcccatcgactccacgaacgaacgtctcgccttcctcaactggtgttggcggcaaggctactcagcagccatcgtggaaacgatggacgccgcgggagcctacgaccacctcgacgacgaccagaccagcaaccagcacgactaacgccgctcccagcacgggggaaggcggcgcaccaggtgcgccgccttcccccgtgctggtgtctcgtcggcttactggtgggggtcgtaggggaacccgtaggtgtgttccagggccttgcggagaaggtcgttcatagttgtgtgttcggcgacggccttcatcttcagcgccgtgtgggtggcggtgggtagcttgacgttgaacgcggtgatcggggtcttggccgactggaaggtttcagagacactggctccctggctggccgccatttggtcggcgtaacggctggctttgtcggcggcggtgggtttgcggttcttactcacttcagcatctccttgattcggtcggcaacctgggcgaactctcctagatctgttggccgggttccgatggcttgccgataggcgacccgtcgatgaacctccgcatcgagaacgtctaggccctcaacggcggcggccccctcgtgggcatcacggtattgcctggtccaatcggctttgttgaagagcagggcccggcgtgtgccgtgggccacctggtaggtcattagcgctcggtccatgtccaggtcccccgactcggtcgggatgatg

SEQ ID NO: 236 - DNA, 5381 bp, Propionibacterium acnes
  source 1..5381: mol_type = genomic DNA
cacccacgacaacccccatgaacgccgcctagcccgtgacgctgaacgcgcccggctcatcgacgaccaactccgccgccgcgcagaaaccgccacctgcgcagcccgcctcgcagccgagcacgccgaccccgactaccagacccgccgtcgtgaacgcagggaaaccctgcgagccacactcagggccgcccagcagcatgtcaggacacactgatacccgctcatacgcacaccatgaaacacgacaagccacctgacagtatcagctgcaagacgcatgacaacatagaaggacatgatgaaatacacatagacacaaccccgcacagcagtttcgcaacaaatcatgatagtctcatggcagtatcgcttgatacacacatagcatcactcccacataggcagttatgctgatatactcctactaggttatccgtccaacatgctgagtgggttcctgtacagcatgaaaggagcatggcatgatatgggccgttctcaactgcaagggtggtgtcggcaagacgaccagtgccctcctgctggcggcagccgccgccaagcagggccacaccaccctggtggccgacgctgacccccagggcaccgcatcccagtggtcagccctggcaaccaaaaacgacgaacccctgcccttcccggtgcaagcggtcaacatcgccaccatggaggcactgcccaccaccaccgacgcccatgatctcatcctcgttgacacacccccctcggcaggcgatctgatgttccaggcatgccgcatcgccgacctcatcatcatccccaccgccacctccggacccgacatctcccgaacatgggtcaccatggacgccacacaaggcacaccacgcgcgatcctcctcacccaaaccgaacacaaccgtgtcgtctaccgccaagctcgcactgccctcgccgccgacgacaccgtcgttctcctggaccacgacatcccccgccgtgaatccatccgcacagcatggggcaccaaccccccagacgacgtcatcacctactacctgcccgtcctcaacgaactcatggaggccctgtcatgaccaccaagaaaaccgacccattcgcccgccagaaagcagcagaagaccgcgcccaccaactccaagacgaagcccaacgccacgcccaccccaaacgcgtcatcggccccaccgcacgattccagttcgtcctgccagccgacgtgctcaccggcctcaaacacctcgccctcacccgcggcaccaccgcccgccaactcaccctcgacgccctcgacaccgcctacggcctcgacaccctcgccaacagcgggaagaaaacccacccatgacccgtgggtccccctgtcaccaccccctcgacggcaactgtgtgcgagccacaggcccgcacacaggcggcagcccagtgccgtccccgccaggaaaggaactgaacttttctggagtgctggctccctatcaccccttatggtgctatcagatccagtagcgccagcccgagaggaaacccatgagctacatcgtccgcaccggaaatctagccggcacccccgagctgcgcgaggggtagccgacacggcggaccgtgcccctgacagtaagcggcactactggagacatcaccatgaccgctcagatcctcgccccgtgcaaccagaaggctgccgtcatcgaaggagccctgccatgaaccaacctaccccccacaaggccgacgagtcacagacgagcaacaccacgaggaagtggcggcacaaggtgtcgttctaccaagacccggccgacaccgaccgagtccgcggagcgatcctccacaccatgacaaccgaaggcaaccggaacctgagccagttcgtcaacgatgccgtcatggccaaggtgaccgaactggaagcaaaatacaaccacggcgagccattccccgccgtgggagcccgaggactcccccagggcggcgcagccgccaacagataagagggcggggaccaccaatagcagtcgatttcggatccagatcgggtagacaggacccatgatgaatttcatatcctccctgctctcggccatcctgaccctctttgcgatggtagccgtggcgataggagtggtgaacattgtgccgggaatatgcgccatcatcggtgcacggaaatacggcgaccaggaccgtgtgcgggcaggacaacgaaagatccttcttggtgctatcgccttggtggtagcagtaggcattcacccgtgacccacggttaccggaagccccgccgcaatcgataccactgtcagtaccatcaggggcgataggggtcaagctctccttgtcacaatcccttccccggcagcccagtaaccgtcgcttacagccatacatggatatgcgcccattcgtcggcaccgacgccgtgcgggttggcgacgctgacccgtctgctcacaaacgacccttccagcccagcaccacccactacaccgacacgatccacgaagctgaaaccgaacctcccatccccgtccgaaacatcaacgaactcatcaaccccaccaaccatgcatgaacgcacgatcgcctaccggccagccttcctgcgcgacgtgaagcggctcaaaaacaagcactacaacatgaacacacactcaaatgggcggtaaggtcacgaagtcgacgtggctgcctcacggatggcttcggcgagctcttggggtcgactccacatgggccagtggccggttggcagatccatcgcggtgaagttggtcaggtgcgcgacggcgctgaacatcggattgcctgctgcggccagctcgaggacctggacgctgggaatggagcagcagatcaacgtggttagtacatcatggcgagcgctattggacagcgcgacccgtgcccgggccacttgcgcgggttcaggaaccgcccgtgcccggaaccggtcaaggtgctcgttgctgaggccctctaaactggcctgcttgccgagagtatcgaagtcaggaagtggcagctcagctgtttcctcaggtagatctggtgcgaaggcacctccatcgctcatgggaccggagtccacccagacgatccgatggaccaactctgggtgcctgtctacaactaggctcaccggcccgttcgcgccactgtgtcccaccaggaccgcatcgccgcccatctcgtccaggatggctgagatggcgtcagcttggtcgtcgagcgtgcgcgtagtgcgctgggtgtcctccggatcgaggccaggcagcgtcagccccacggctcgactgccagcagtgttcaataactcgactacctcgtcccaagcccaggctccgagccagtaaccaggaacgaggacgataggccgatgctggtcaggtcgcgatgttgaagtcatggagacatagttgcacagtgcgcggacaagggagtggcactatttctggcatgaatttagatctgggtgtccggtgaggcgatcagaacgcctccatgtactgtccgagtgtctacgatgcagcggacacagtcgagcagctggctcacaagtttccaggtgtccttctgcccctatgagggaagtcggctgctctcgcaacctttgagggctgctctggggtcggaaccagttacagatcgttcaagttccgggaactaccgccggtcacgctgattgattcccgggcgatctcgcttctgacgacagtggtcggtaaccgagaggcgtcctactctgaccccgctgctgcggtgagtaaatcacgggcgtcccggatccggccacccgtccaagtgccagccagcttgatcggctaggcatcgtcaaggagcgacgatgaggtgatgatgcgatgtgagcgcaccgcgaagtgaggtataaagaagccttcccgggcgcatgcgtcgcccaggaaggccaggttggcccctggacggctgaatggttgggcggatcaggctgtagcggagacgtgcagtacctcgtaggcgatggcgttggttgggctctggtctgcatcgtggctactgagttcgacgaggatgacggtccaggtggtgatgtcgacggcggtgacgcgggcgatggtggaatcagtggatgctgcaaggaagtcggcggttatgtcttcgatgcagtgggacggagcagtgctggtgggcaggggcacggtcttgacggtcaggcttcgggcagcagagtaatcggcggttccgttaacaagctggtggacggtccagtcctggatcgggtgccggccgaagtcgcgtacgatagccgagtaaccaagttcgccccagcagaactggcgcatcccctctatgtcgcgccagacgtagaagggcgcgtaggagttctggggtgcgcctttgaccttttcttggatgaggtaggccttgaactccagtccatggtagccgtccatgaggtgtccagtctggatgacgcggtcgcggatgatctgcatgtcatagtcggtgggcagggtgatctgatattgcatggcgtacatcagcggttctccttggtttcgtgggagtaggtcgtggggatgacgggttcctgccaatcgatggttgacaagtcgtcggcggcttgttggtaggtaaggtggatcattggctgtttgagtgcagcgccatgccagtgtctctggccggcgtcgatccagatggattcgcccttggtcaggtgctggggtgcttgtccttcaatatggaccagggcaacgccgcccgtgacgtagaggccctgtcccttggggtgtgtgcctcagcggcaaacgtgacggcgtgggcggcacgcccggcgtcttccgtggcacgatcggccggatccatggcggcgcgcagctgctgttctgcagccaggcgtccaggtcacggcgggcagcatcgacacccagggcagcctcgacggcttcagggctacgacgctggccgggctggttgaccgcagaccactggtgccgggcgtcgtccagatcatggccggcggcgtcgatgagggcggtggtggcttcggcgcagcatcgcctgatccactccgaacgtgacaggccagctgtctcggcggcactgtcaatgcgcgccaggagagatttcatgggcgctcatctgtagcctccagataggcgttgatgtagcgcagagcctgatccgtcatgtcgatggcggctgcctcggcagacgacacaacgggctgtggatgataagaccacccaacatagacggcgaacatcaatttctcgacagctttcatgaggtccccggcggcaaccgcatccgcctcatcatccgaggagaaccacttcaggtctgaacggctgtacatagcccctaggtcctgatgtgggtcgaggtcc

SEQ ID NO: 237 - DNA, 5561 bp, Propionibacterium acnes
  source 1..5561: mol_type = genomic DNA
gggatgaggatgacggccgcgccgacacttcggagcgaggtcatgtgacgatccttcggtagctcgacgggttgccgtagatcttttccacgttgatgccgctgtgggggttgtcggcgctaaccatttggcctccaccgatgtagacggccacgtggtgggcagggtttccccagaggatgaggtcgccgactttgagctggtcacgggccaccgcggtgccgacgtgctgttgttcggcggcggtgcggggaaggctaatgccgatacgccggtacagcgccgaggtcaggcctgagcagtcgtagccgccatcggctttgccgttgccaccccacacgtaggcgtaggagttgttgtcggcgatcgatttggcccatgccacggcttcggccaggttcttcgacacaccggtctcgttagcggccccggtggcacagttgtttgacaggtgccctgtagtagtggatcccactatttgtttggccatggtttcccatttggcgtaggcatcgggcagggctgagccttgcactgcctgagctgcctgcgtcagcggcatcttctgccagtcagcgatgtcgactaaaccgggaatgtggaatccagggccgccggccgatccggggccagcgtaggtgatggtgtggcctttcaagaacgcctcggtggcgtaggcatcattgttgacctgatccagagtcccgtaccagcccggcaggatgcgctgctgaaaggggccggcgtcaccgtcaccgttagccttcgctgaggtagggtcggccccaagatctgattcttgtttggcggtcatgatagcgatgaccgctgcctgggtaggcagtttgtcacgctggaccacagtgacgatggtggtcacgagctgcttctgcctggccgtgaggcctccggcacccacagtgcctccggtgacggtacccacgcaagcatccccgccgacactgccaccgccgccgccagagttgtcgtcgagggccccagagcctactgacagcagcggcacaatgatcacggtcgcgggcaagaccgccaggcccgccagcatcagcactgctgcactcaccacggcgatcacgtgagatgctttcaacgctgcccacctctcgctggtttgagggggcgacgcctgctggtacgcacaggcttggttgatccagtccgccgttgattggcaggcctgggtttgatcggcttgctgggacccggtttgggctccggagtcttaggctccggcttcacatgcctaggcacttcggctgcggtgggaggagtcagcacgtggcgtactggcttggtgaccttctgggcacccgaaacaaccggcttagacaccaccttggcacctttgaccaccggtgcggctgccttcgcgccggccttcttgactgcacgatgcgctttgatagccccggcctcggcccggccaaccctactagcagtagcatcgaaggctctgtggcccgtcgttgccctcaccggtgcatccttgccctggcgggtctgcttagcgatcgccgacatgccgcctcgcaatgccgaaacacggttgtgggcgtgggcgatcgccgacataccggccgtcgtaattttcgactggccctgcggggcccctgccccagcacgaatctgccggtaagccgccgacgtgcgacgagcacccgccgccattcgcgccaccttcgcagccctagtcactcccgtcgacacgccacccgtggctaccgcagcagcacccgagaccacagtcgaggccatccgccttcgacccgatccagtgagcttgcgaccaccactgcgcaccatccggcgagcaccccgcccagcccactggccaatcgccgacgccccttcagagcgcttgctgcgcatccaatcgttgatcttgtccctcagccccttctcgcccttgtgacgacgccacatggacatcaagaacccgataatccccacgagctcgagcatgttgacaaccatgaccttgatggcgacatcaccgtcagaggcgaaaaccgacttgatgatgagcatgaccacacccaacatcaccatcgacccgacaatgccgatcatcgagtacaagatcgaacacagatcccggatgagcggatctgtgcggccagggatagcccgcaacacgttgagcatcgacatgaacgccgaccacaccaacttgcacacgtagaaccagcacatgcccgcgaacaccagcaggaccacagccaaacccgccaccgtcgacgagtaaaagaagaaccccaccaaccacgaaccatccgcaatatcgccggcgtaatccgacaacccctcatcacagtcaccaaggtcgtcgcgagcatccgagacgtcatcgtaagggccacccttgagcacctcgatgtacttgtcgtggcacttcgcatcaataatccggccatagttgagctgctgatgaaccggcgccacgaacgagtccacaatgatcgccgacagcttcggatccttcgagtctcccgtcgaggtcatgtcatcaggaatctcgacctcaccagcggtcgccgtcgcaggatcaaccgaactggtaatcatccgagacagcgccacgccgaactgctgggtgcgagccagcggagtagccaacgtcgtcgtatcgcctgcgaacttcgccactggggccgccaagaaacccaacgccagcgccgcagcaatcgccgcacgcgcacccgtagcccacgcccctgccgtacgtcccctcatcatcttgacgaccacgcccacaccggcgcacgtcgtcagcaacgtcaacaccgttccaccccagctgtccgctcccagcggggccaaaaccttgtcgtggatgtcgttctgtaaccccaccagcggtccggtaatccacccgacccagctcatcgccacggtccagtccaacaaccggcacagcaacgcaatgaccatcaggtacgtgttccaacacatgccaataatggaggcccacatactcttcagcggggccgtaacgccaccatcgtccatcgacatctggtactgaaacaagtgaataccgttggagtcagtcacattgaaaccgtcacccatccagcccagccccgggcccgatgccatggcaggcacactgctcagcgccaccaccaaaaccagcgtggtgacgatgatacgaaatcgccgctccccggccccggggcggcgtggatgacggctcacgctgtctcctggtcgtgctcgggcgggttggagctggcggcttcgcggtggggagcgtaggcaggtctcagtagtcgaatttcaccgacgttgccgtgttggtcggcgtacaggccacaaccggggcctccggggttgagggcaatcttgaccaggtcagcgaactcttcaggggacgtcttgggatctacgcccaggaactcgacacctttctgggcgaggttgatgttgtcgcacagcaacacgatgcgatgctgaatgaggttgcggacggtctcgttggggtaatcggcctcggggtcgtgggagccagtaatgagccaggcgttggctcggcgggattcgcgcacgtactcatcgatggcgtgggaggcttccggcgaggacgacatgtgatgaaactcgtcaacaatgaaagcggcgtcgcgggcccggtcgctgaagcacaccaggcgagccagacgggcaataagcgcgtagagggctcgaccaaacaccttgtgcgggggcagctgccgaaacaaatgttctgacagcatctcctcggcgttaggaagagcgatgccacaagtgccaatgatgaggatgtcggcactcaggtcggcgggaggaaggtccgggtcaaagatggccgaagctagggaggccgagttctcgatgtcagcgaacacggcaatcctgtcagcgatcgcggtggcctcgggaaggtcgcactcctcggccaggtggcgggccaaacgcccacacgaggtgatctggtggtcacgcatgtaggccggtttgaggaccttggccagcgtggtcccggccacaccgatggtctccaagttaagcaaggtcagcaagaacgactgggcgacctgcccggccatctccgggggaaggatgcgcagcgggtccagcgacagcttggggtgggccgtgtcgacgatctggcgtctaaccccgtcgatagagttgacaaaggttacccactcccgctcatcggagttgtcggtggcaataatgcgcccgccccgggccgcgatggctgcgcacagccgcttctcggccatcgtcttgcccgcgcccatcttgccgatgaacgccaccgtgttgcctttctgatcctgagtgtcggcatgcaaatcgaggtaggccagcgactgcaacggggagcctgtgaccacagccaacgggatgccggtggtacggcccaaccggtactcaaccaccgggatagatgcggcgaacgcggaggcgtgagtcagctgacggtaggcgttaagtgaggaggagaaccggccaccgggccgggcagcccacagcaagtcctcctgacggcccacgggacgcacccacgtgaagtcaccgaacaccggatcattgacgaacgctcctgccagctcctcggtggtctcaaagtcaggagacgagacagtgacggtgataagagcctggatctcgacctcacgctcatcggcggccagctcggcgttgtagtcgacgagcacctgagcggaatgctcgatagacatgagggtcgaagcctgggtcatctcaccgccctcaacattgtcgagctgatcgaccgtttgacggatagcccgctgatttttctgcatcgcagcgtgacgggtccgggccactccccggatcgccacgtcgaccggcacgccagtgtcgtcgatacggcccaggaactcgtaggcaggccacgtcatcgtgcggggcaccttacccagcacgatatgggactggtagacggtctcgccggtgtcggcaccgattttgaggacgcgacgattccacgcctgagccgtccgggacatgtgggagactcgcttgtcatcctcgctggccagcaggtcggaggtcgcggcctcatcgatgaccaactcccccagcgcggcacgtccaacctcatccatgagggcgattccctcgccaggggcatcatcacgcaaccgggtcgggtggcctgacaggtgctgccgaagccagatctgttcatcaacggtgaccgggcggggttggaacgctgccggcagtttcgcaccgaattccttagcctgacggagggcccactcccgtgcgacacggccaggagcggtggtcatgagtccggcggcttcggtgattttgttgagggcggcggtccaggcggtgtgggtgcgtattttctggtcttggttgagtttgatcgataggaaccacacgcgccggcctagggattcggtttcaggctggtcgagggtggcgtcgatttcgtcggcccacacggggtgttcgctcaggtcgaggccggcggccatggcgtcgacgatttctgtggggtcggtccaggtgagggctccgttgag

SEQ ID NO: 238 - DNA, 4899 bp, Propionibacterium acnes
  source 1..4899: mol_type = genomic DNA
gataccgcaaggctgtgtgggatcagctgttcgggatggggcggttgcagccgctgttcgaaatcagcgacgccgaaaacatcatcgtggtgggtaaccatgaggtggttgtcgaccacaacgatggttcccggtcaacgctgccgccggtggccgactcggatgccgagctggaatcccagatcgcccggatggcgaggaatgcgaccccgcggcgagccttcgacgccgatcacaccgatgtgacgatcatgcaccaacagaagttccgtatccacgcgatctcttcggaggtgtcgttgcaaccgtcggtggtcatccgccaacatttgctcacccaaatcagtctgggggacctgtcccagcggggaatgatgccggtggaagtggcccggttcctcgatgaggcggtacaagctggcaagtccatcgtggtcgccggcgagcagggggcaggcaagacgacgtttttacgagcgttgatccacgccattccgatgcgggagcggttcgccacgttggagaccgatcaggagttgttcgctcatctgatgcctggccgggaaaacacgctggtgctgttcgcccgtgatggtaacggcgaggtggatccggcgactggcacccagcacggcgctatcgagatcgcccagctgattcctcctagcctgcgccaggcgttaactagggtcattgtcggtgaggtgcgcggcaatgaggcttcggccatgttccaggctatgcagtcggggactggcactatgagcagtatccactccccgcgagcctctgaggtgccgtcccggctagcccaaatgatttcgatgggcccggtctacgatctggatcaggccatgctgcagatcggtcattcgatcgactacatcgtctttgttcgtaagcgtgacctgcctgatgggagccggctgcgatttgttgagcagatccgttcagtctcgcctggtgattcgacaactcccagtcttggcgaggtgtacacggctgactcgtggacaggccagccgcttacgccactcatgcctggttcggccgccgacgagctgtctcacttcgcccgagacctggattactgcgaggcccactgatgaacaccccagcgctgatagcagccctcatcgtgaccggcctgggactgatcatggccatcaacggcctgatcccggccacacccaaacccggcaccacgctgacgctgtcacagcggtgggcccgggccacccaccgcccagccggggcagccgggcgccgacgcgacctgcgctgggcgctggccggtctcgtcggcatcgtgctgttcgtcctcacaggttgggtcgctgccctggccctgggccccatcaccgtgctgctagcacccaccctgctgggggcggccccaccgaccgatattccgctgatggaggcgttggatcggtgggtgcgtcaggtcgctgcggtgctgccacaggggcgagacatcatcacagcggtgcggatctcacggccgcgggccccgaagctgatcgccgggtcggtggatcaactggtgtcccggttggatggccgtatggagccgagggaggcgttccagcggatggccgacgagctggactcggctgaggctgacgcggtgctggcctcactagcgttggcggccactcatccgcggggagcctcgacaacgttgaaggctattgctggcaacatccaacagcggttgaaagtgctgcggcaggtggaggctgagcggtctaagccgcgtaactcggtgcgccagatcacactggtcacgatcgccatgttcggggggctgctcgtgatcggacggtcgtttctggccccgctggcgacccctcccggtcaggtgctggtggccgtggcggtggtcatgtatgtcatcgcactagtgcagatgtatcggatggcgcggccccgtcgacgcacccggatcatggtcaggaggacccgatgaccattactgctttgtccctgctggccggggccatcgtcactgtcggactgctggtcatcgtggcagcgttccgcccagccccaggccctgacctggttgccgctctggaggtggtgtcgggtcgcacctcaagcgtcgccgagaacgtcgaccagacccggatcgggcggataggtcgcagcgtgacccgcacattccatgtgtcggtgtccccggccatgcgggccgcactgcgactccaaggcacgacccccgaagcgttctacggtcgacgcctgatctgcgcactgatcggggcgatcctgccgtggctgctcaacgcggtagccatcgcggtaggggcgaattccccgaacctactcatcccttcggcgctgtgtgtggcgttagctggcgctggatggatgctgccggcagcacggttgaaggctgcggccgggcccaccaacgatgactcgttcgaagcgctgctggtattcatcgatttggtcgtgctggaacggctcgccaacgaaacctccgtcgacgcgctcaccaatgcggcaaacatgtcggactcgccgctattcgtccagatccgtcaagtcctcaaccgtgcctccctggaaaacgtcgacccgtggaacgggctagaccggctagccgaggacatcaaactgcccgaactcaccgatgtggtctccatcgcccgcctccaaaacgaaggcgcctccctcgtcgacagtttccgggcccgagtcgccgagttgcgcgacgcctacctgctgcgcctgcaacaagaatccaccgccatcacccagcggcttggtttgtggacgatcctgcaagccggctcggtcatgctcatcttgctgggggcggccgccctcacactcatcacagccggataaaccgacatcgtgtcgagcccccatatgggccgcgaacctttcataatgatgcctgtaagcaccacaatattgatcacaacctaacaatgaaggagaaatcatgatgaccgatctcgacctggctaaaaaacagatcacctggctggcggcgcacctgcgttcccggatcgttgacgagcgtggcggtggtagctctaccgtggagacactgatttggattggtgtcatcgtggcgctggtgattggtgtgggcgtcggggtgacggcctatatcaggtcgaagatgcctcactgacgacgatgcgtagcaggttcacaactgatcagcgtggcggtggtagcgcgtcggtggggatgctcctgctgatgcctgcgatcatgctgctggcattcggtgggatcgaggtcgggatgtggtgtcacgcccatcagtcgaccatcgcggcagcccaaagcgccgcggaggctcagcgtgtcgtccatccggtcccggggtcggcacaggaggcagcctcgcagatcactagtcatggcggggtgcgtgatacccggatatcggtcagtgatgacggggccactgtcacggtgaccgtctcaggtcgggccccatcgatgctggggctgcatcttccggctgtgtcgtcgacagcgtcgatgcccaaggagcgcctgtcgtgaggcgaagtgagcgcggtggagcaagtctaagcgtcgaggtgctcatgtgggcgccgatcgcgctggtgatcatcgggtttgttgtgggtatcggccggatgtcgatggcccaggacgcggtgaatggcgcggcgggtgctgcggcccgtgcggcgtcgttggagcgtgatggacagtcggctcagtctgcggcgcagcaggcggcgtcggcgaacctgtcgtccggtgggctggcatgtgcgccgaatgtgagcgtggacacgtcagtgtttgcccgtcctgccgggcaggcgggcacggttcacgccacggtcacgtgtgtcacctcgctgggtcttgggttcgggtcccggacggtgcacgcaacggggtctgccccggtagacacctatcgggaaaggagaggctgagatggcccgtgatgagcgtggtggcggctcggtgtcggtgtggatgctgctcatggtgccggtgattctggtcatggccggcctggtttttgacgggtcccgtcagatatcggcaacccaggcggcccaggacgcggcggttgcggcatcccgcgccggaactgatgcggcagcgacaccgcagcttgctggccacgacggggcggccgtagcagtccaagcggcccgccaggcactatctgctgccggggtggacgggtcggtgcaggaggacgggtcgaccatcacggtgaccacgtctcaaagtcggccgacagtgttcctgtcagcgatcggaatcagccaggtaagggggcatgggcaggcccatgctcagcttgtgggaccgggagaacgcccatgacagtgatacgtcgtatcggtgccctggtggcactgctggtggtgatagccggcttaccggccgggctcgtggccgcaggcgccccgctagtaccggcgggcctgtcatgggcccatgtgcggcatctgttggttaccccagacatgaccgggtcggtgctggtgtggctggtcagcctcatcggctggatcgggtgggcatggttcgccctggccgtcgcagccgaagcggtgacgatgctctcagggcagcggctgcactggcacatgcccggccctcgcctagtgcgccgagtggcagccggtcttctcattgccgcgttcgcggccgcaccggcagccacaagcacggctcacgccgccgaggccacccatgtggcggtcgccgcccaggctggaccggcacacgcggcccccgcccaggacagccccgccaccacctctcaggccccggacgcctccaccactccgaaaatctggaagacctacacggtgcgggccaacgactacctgtggaagatcgccgagcactactacggtgacggcg

SEQ ID NO: 239 - DNA, 5203 bp, Propionibacterium acnes
  source 1..5203: mol_type = genomic DNA
gcgataccgcaaggctgtgtgggatcagctgttcgggatggggcggttgcagccgctgttcgaaatcagcgacgccgaaaacatcatcgtggtgggtaaccatgaggtggttgtcgaccacaacgatggttcccggtcaacgctgccgccggtggccgactcggatgccgagctggaatcccagatcgcccggatggcgaggaatgcgaccccgcggcgagccttcgacgccgatcacaccgatgtgacgatcatgcaccaacagaagttccgtatccacgcgatctcttcggaggtgtcgttgcaaccgtcggtggtcatccgccaacatttgctcacccaaatcagtctgggggatctgtcccagcgcggaatgatgccggtggaggtggcccggttcctcgatgaggcggtgcaagctggcaagtccattgtggtcgccggtgagcagggtgcaggcaagacgacgtttttacgagcgttgatccacgccattccgatgcgggagcggttcgccacgttggagaccgaccaggagttgttcgctcatctgatgcctggccgacaagacacgctggtgctgttcgcccgtgatggtaacggcgaggtggatccggcgactggcacccagcacggcgctatcgagatcgcccagctgattcctcctagcctgcgccaggcgttaactagggtcattgtcggtgaggtgcgcggcaatgaggcctcggccatgttccaggccatgcagtcgggtacaggcaccatgagcagtatccactccccgcgagcctctgaggtgccgtcccggctagcccaaatgatttcgatgggcccggtctacgatctggatcaggccatgctgcagatcggtcattcgatcgactacatcgtctttgttcgtaagcgtgacctgcctgatgggagccggctgcgatttgttgagcagatccgttcagtctcgcctggtgattcgacaactcccagtcttggcgaggtgtacacggctgactcgtggacaggccagccgttgaccccgctcatgcctggttcggccgccgacgagctgtctcacttcgcccgagacctggattactgcgaggcccactcatgaacactcccgcactaaccagcgccctcatcatggccgggctagggctgatcctggccatcgacgggctggtcccggcgccgcctcgacctggggccccgctgagcccggcccaaaggtgggccaggctcacccaccgtcccacaggagcggccgggcgccgccgggatttgcgttgggggttggctgttctcgtcggcgtcgtgctgtttgtgctcaccgggtgggtggctgcgctggcgttgggccccatcattgtgttgttggcccccaccctgctgggggcggccccaccgaccgatattccgctgatggaggcgttggatcggtgggtgcgtcaggtcgctgcggtgctgccacaggggcgagacatcatcacagcggtgcggatctcacggccgcgggccccgaagctgatcgccgggtcggtggatcaactggtgtcccggttggatggccgtatggagccgagggaggcgttccagcggatggccgacgagctggactcggctgaggctgacgcggtgctggcctcactagcgttggcggccactcacccgcggggagcctcgacaacgttgaaagctattgctggcaacatccaacagcggttgaaagtgctgcggcaggtggaggctgagcggtctaagccgcgtaactcggtgcgccagatcacactggtcacgatcgccatgttcggggggctgctcgtgatcggacggtcgtttctggccccgctggcgacccctcccggtcaggtgctggtgaccgtggcggtggtcatgtatgtcatcgcactagtgcagatgtatcggatggcgcggccccgtcgacgcacccggatcatggttaggaggagtcgatgacgacgactgctttgtccctgctggccggggccatcgtcactgtcggactgctggtcatcgtggcagcgttccgcccagccccaggccctgacctggttgccgctctggaggtggtgtcgggtcgcacctcaagcgtcgccgagaacgtcgaccagacccggatcgggcggataggtcgcagcgtgacccgcacattccatgtgtcggtgtccccggccatgcgggccgcactgcgactccaaggcacgacccccgaagcgttctacggtcgacgcctgatctgcgcactgatcggggcgatcctgccgtggctgctcaacgcggtagccatcgcggtaggggcgaattccccgaacctactcatcccttcggcgctgtgtgtggcgttagctggcgctggatggatgctgccggcagcacggttgaaggctgcggccgggcccaccaacgatgactcgttcgaagcgctgctggtattcatcgatttggtcgtgctggaacggctcgccaacgaaacctccgtcgacgcgctcaccaatgcggcaaacatgtcggactcgccgctattcgtccagatccgtcaagtcctcaaccgtgcctccctggaaaacgtcgacccgtggaacgggctagaccggctagccgaggacatcaaactgcccgaactcaccgatgtggtctccatcgcccgcctccaaaacgaaggcgcctccctcgtcgacagtttccgggcccgagtcgccgagttgcgcgacgcctacctgctgcgcctgcaacaagaatccaccgccatcacccagcggcttggtttgtggacgatcctgcaagccggctcggtcatgctcatcttgctgggggcggccgccctcacactcatcacagccggataaaccgacatcgtgtcgagcccccatatgggccgcgaacctttcataaggatgcctgtaagcaccacaatattgatcacaacctaacaatgaaggagaaatcatgatgaccgatctcgacctggctaaaaaacagatcacctggctggcggcgtacctgcgttcccggatcgttgacgagcgtggcggtggtagctctaccgtggagacactgatttggattggtgtcatcgtggcgctggtgattggtgtgggcgtcggggtgacggcctatatcaggtcgaagatgcctcactgacgacgatgcgtagcaggttcacaactgatcagcgtggcggtggtagcgcgtcggtggggatgctcctgctgatgcctgcgatcatgctgctggcattcggtgggatcgaggtcgggatgtggtgtcacgcccatcagtcgaccatcgcggcagcccaaagcgccgcggaggctcagcgtgtcgtccatccggtcccggggtcggcacaggaggcagcctcgcagatcactagtcatggcggggtgcgtgatgcgcggatatcggtcagtgatgacggggccactgtcacggtgaccgtctcaggtcgggccccatcgatgctggggctgcatcttccggctgtgtcgtcgacagcgtcgatgcccaaggagcgcctgtcgtgaggcgaagtgagcgcggcggagcaagtctaagcgtcgaggtgctcatgtgggcgccgatcgcgctggtgatcatcgggtttgttgtgggtatcggccggatgtcgatggcccaggacgcggtgagtggcgcggctggtgctgcggcccgtgcggcgtcgttggagcgtgatgggcagtcggctcagtctgcggcgcagcaggcggcgtcggcgaacctgtcgtccggtgggctggcatgtgcgccgagtgtgagcgtggacacgtcagtgtttgcccgtcctgccgggcaggcgggcacggttcacgccacggtcacgtgtgtcacctcgctgggtcttggattcgggtcccggacggtgcacgcaacggggtctgccccggtagacacctatcgggaaaggagaggctgagatggcccgcgatgagcgtggtggcggctcggtgtcggtgtggatgctgctcatggtgccagtgattctggtcatggccggcctggtttttgacgggtcccgtcagatatcggcaacccaggcggcccaggacgcggcggttgcggcatcccgcgccggaactgatgcggcagcgacaccgcagctagctggccacgacggggcggccgtagcagtccaagcggcccgccaggcactatctgctgccggggtggacgggtcggtgcaggaggacgggtcgaccatcacggtgaccacgtctcaaagtcggccgacagtgttcctgtcagcgatcggaatcagccaggtaagggggcatgggcaggcccatgctcagcttgtgggaccgggagaacgcccatgacagtgatacgtcgtatcggtgccctggtggcactgctggtggtgatagccggcttaccggccgggctcgtggccgcaggcgccccgctagtaccggcgggcctgtcatgggcccatgtgcggcatctgttggttaccccagacatgaccgggtcggtgctggtgtggctggtcagcctcatcggctggatcgggtgggcatggttcgccctggccgtcgcagccgaagcggtgacgatgctctcacggcagcggctgcactggcacatgcccggccctcgcctagtgcgccgagtggcagccggtcttctcattgccgcgttcgcggccgcaccggcagccacaagcacggctcacgccgccgaggccacccatgtggcggtcgccgcccaggctggaccggcacacgcggcccccgcccaggacagccccgccaccacctctcaggccccggacgcctccaccactccgaaaatctggaagacctacacggtgcgggccaacgactacctgtggaagatcgccgagcactactacggtgacggcgcccaattccgtcgtatcgccgaagcctccggtatcgacccgcactcagagctgaaagtcggccagaaactggtgctaccggttcccgagaacacggccgcgatccattcggttaaagcgggggagtatctgtgggagatcgccgagcactactacggtgacggcgcccagtaccataaaatcgcggaagcttccggtatcgatgcccattccgatctagccgtgggccaaaaactcgtcatccccgggcccctccgccacgacgccacgccgccacaccactcggcgtcgacccacgcgaag

SEQ ID NO: 240 - DNA, 2238 bp, Propionibacterium acnes
  source 1..2238: mol_type = genomic DNA
gacgccggccaccccaactactccgacccacacggtgaccccagctccggcctctgccggccactcgaccagcgacgagcacccactccatacggataccgccacagcggacaaggccagcgacgaggacgccctgtccccaatccaggtgggcttgaccgccagcgtcggactggtgctggtcgccggactgatcaccaccctcaaccgccgctaccggacccggttcacccgccagccccgcggcaaggccatgaccctgcccagcccggacgcccaaactgccgagatagcgctgcgcagcaccggggcgactgacactctgacgatcacctgcctcgaccaggcgctccgcgcgatcggcgcatggtgccaccactgcgggcacccgctgccacccctgctggccgcccgcgtcgacgacgaccggatcgacctgctgctatcccaggcggcccccgaccatcccgaggcggtggagctggccgccgacggatcggtgtggaccctcaccgccgaccggatcgacgacctgctagcccacaccgatgacaaccaagcggctccgtggccagctctagtcacactgggacgcgacgacgacggcgcccacatcctcatcgacttggaagccgcaggaaccttgcacctgatcgccgacgacgaccaggtcgacgcagccctcgccgccatcgccgtggaactggccacctgcgactggtccgacgaagtcaacgtcaccctcgtcggccaagtgtgcccgggcctagaagaggccttgggctctccaaccctgacccgcgccaccgacgtcgacgctctcttggagacgttggaggctcgcgccgacgatcagcgacacatcctcaccgaaggaaaccccctcgccgctcaccgagccgaccccgccatctccgacgggttcgacgccgaagtgatcctcctcgacaccgaactcaccgaagaccaccgcaaccgcctcgccagcctcgtcgaggctcttccccgcgtgtcagtcgccgcggtaacaaccagccccaccagcccacacgaatggtccctcaccctgacaggtgacccactagccgccgacctggctcccctcggctggcacatccacccccaaaccctctcccccgacctgtacaaccgcatggttgaactactcgccaactccgccgccgcagactacgaacccgccagctggtggaaccacgacgccgacgacgagcccaccaccgaccccaccaacgaggaagaatctaccccgagcaggcgagcccgcccgaatatccgcctgaccaccctgaccggcggcatcgacctatccagcgtcgacatcgacgacatcatcgacgaagccaaccaggccctcgacaacaccgaccagaccaccaaccaggttcgcgtcgacaccgaccaacccggcaccgacacccccttccccatcgacgacatcgacccgctgagctccgaccacccggtcctatccatcatcggccaccccgacatcacaggtgccactggaaccgttgggcgctccccgtggcgctgccaacagttggccctctacatcgctgagcatccgggagcatcgggggcgactatcgccgatgatttggggctatcagcgccgacggtgcgctcgattgctacacacctgcgacactggttgggagccgacgatgccggggtggcttacatgccggcggcgacgcgcggctaccggctcgatgagcggatcgtcacagatgtggacctgatcgacgctgctgtggccggggcaggcattaacaccgctgagacggccacactggtggccattttgaagctgggccgcggacgggtcttcgctggggttcctgactcggaacttcgccagttcagggcgtcgatgtaccacgtggaggcccgcatcgtcgatgctgccctccaagtgacagaccgggccctggaagccggagacttggggctggcccggtgggcgctgacccaagggctactggtgtctcccgatcatgaggacctggtcgccggttgtctgcgcaccgaataccaggccggcaacatggacaaggtcgccgagctggtcgatcacctgtcggctaccgcacgccgactgggcgtcgacctcaacgaggacaccacccggatcatcgatacggtcacccacgccgacaggagagcatcatgatctcccctgcactcatctccgtcaggaaggttcctatgcaccat

SEQ ID NO: 241 - DNA, 739 bp, Propionibacterium acnes
  source 1..739: mol_type = genomic DNA
acgtgcgggtacacctaccagcaggcagccccggaaggcggttatcaggtcaccgcaatcacgtcgtgggatgtgacctggtcggtactaggacacacgggcacagtccatatcgagaaggccggtgggcagatgcttccggtcggcgagttggagtctgttgttacacggcgatgactcctgatagtccgacgctgtatgaggtgttgggggtctgccctgatgccactgatgaccagatcaagacggcgtggcgtcgtgccgcgaaagtgactcaccctgatgccggtggcactagtgaggcgttcgcggccgcccggcacgcctgggaggtgttgtctgatcctgcccggcgcaccgcctacgatgccgacctggcgggggaggatgatcccgacgacgaagccgccgacgccttcgacgttgatccgttcacggcatggccctggtgcgccccgtacatcgacgccacccccaccctgcgccacacctgccccggcacgatcaaggccatcgtggtcgccatcgccgggatcatggccggaatcggctggcaggaagcgctggaggccgtggtgtcgccgccggggtttctgggggcgtgctggatagtctcagtgccggttgtcgtcgcagtgacatggctggcagcggtgacgggtctggcatttttcaccatggcggccatctggtgtggatggtcgttgataggtggtgcgttgctgtggggccagacgtc

SEQ ID NO: 242 - DNA, 4920 bp, Propionibacterium acnes
  source 1..4920: mol_type = genomic DNA
ggccatcctgcggccgcaatagccgcgacggcgaccacccacacgatctgttgcatgggtctcatcatggcccatcatcgatgagtatgggtggccgacatggggtcactcgtagaggggatcgaggggtgtgcgggcgagcatggcttcctgtgtgccgagcatgagggtgccagagtcgtcgccggccgattcccagtcgacgatgatctgcccgctgtcgacgctggattcggtgatggtcacccattctccgtcgatattgatgagcaccccagcggccagctctgtggcagcaaccgggtgggctgggctgtagaggaggtcgatgtcgcgggcagggtcgtcgggttcttcggttacctcgggtggggtcgatctggctgtctcggtgtcgtcggccaggtcggctcccaggatgcgttcccattcggggctggttttcttgcccgctgaggccatcgtctcgtcgatctgttcgtcagtgggccacacaaatttctttttggtccaggtcgtggtgtcgggtcgcagctgatccagcagttccaggtcttgcggggagtgggccttgcgggggtcgggggtgtagaagaattggacttccttgggggctgattcgccggataggtaggtgccgcggccgcgtttgccgaacgggattcccacgccgacgtgttcggagccgaacatcatgcgggctccgtcagcggacaggggtccggtggcggcacgcccggagaagttgtctcggatttcgccgcccaggaactcggcgtcggggcgttgggtccccagatcgacgtggatacggcaggcggctgccatgcgcagcagggagccgatccagccgaaaacggggcattctccgggcatcccagagaccttgatcgttgaccaccagtttttcgcgttgccgtagaactggcggtactcgtcgatgaggaccagcacgcgggtgaagtcggtctcgcgggccccttcttcttcgatgcggcggtagcggtcctccatgagagaccacagccagtggatgagggcgacctggtcggggacggtagtggcgaccatctcgatgttgggccactcccgcaggcccaggtactcgatgcgtttagggtcgatgacgaagacgcgccagttgcggcgggcaccctcgacggcgtcgccgatcatggacaccgtttttccggtacgggtgcggccggccttgagctggtgggccatgacaccggagatgtcccagaaacaggtgttgccgtcctcgtcgacggcctgggggattttctcccagtctggggagtctgggcccggaagggccacgggtcggggcaccatcgagggcagggggtggcggcgggtgacggtgatggtgtcgtgttccaggtcgaagtcgctgcgccactggccgagcatcatcgccgaggtcaccgcggccaggcgcaattggatgttcgggctggacaaatgggcgccacgttggtggtgaatggtgaagccgtccaggttcccccgatcggttttccaggaatcgacggtgaccgccgacccatagatctgagtggctacttctttagcccgttccttgtctcggtccagatcggttttgtcagggtcaggggtcggggcgcggtattgcaggacgaaccggccggccgggatcgttgcggatgtcaccgtgaactctgccggcgaccaggcagccgcggccgcctgggtgagggccattggcatggtctcgacggcagcctcctcgggggggatggtgagggtcaggcgtcgcggatgcgtcttcttgcgattccatgtgactttctgcctcaccggcaccttcgccgccgactgaatggctaggcgagctgattcggcagtttcggtacgccggccagcgcgtagcgcccgtcgtgcgtgaaggctgcccaccacagcacagcccatacacggcagccaccagcgcggatcagcggctgctgcatagcccccggtagctagtaccgcacctgaccagccggccgcgatacttttccacgccggtttcgcaccaacagtcggggcagacgctggccgcttcgagaccgaggagggacgagacaagggagtgctggtcatgccgcggcctccttgtggcaggtcatttcacaggcatgccggccagcgatgatgccgtggcgcaccgccccggtagccgcatagaccgcgcacaactcaaacacggggcacccatcgcaggccgccgggttcatgctttctttgtcccacgatggtgggtcatcggtgcacggcacggccaggccatcctgttgagcggcgctgatagcggtgaataggcgcagctgggcgcgaacttggtctggggtcaggttgacggtgcgggctacacgcatggggttccttcctcttcaccagtgaaggttccctagacccggccgatgtgcggagggatttcagtgttttatcgaggtgaccagccagccggtctgcgctgcgggttcaggtaccagggtcagatgcaccacggtgtggtcggctaggggcacggcgaccaggggcccgtcggcgctcgccccggtgagggtgggagttccggccacggtggtggcgggaatctggttgggtttcgcggccatcagggagcccatgagggtcggggcggcgatctggacgagggcgactttgcgggcggcgggatcgcgggtcaaccagccgcgggtgaaggtgagcgcagccgacgtgatatcggggctcagcggggctggtgtggcggcggggtgggccgttgaggagggccatacgcgcggtagcgctggcgacatcgagcgggtcggagtggggtcaggtgtggggcttagggtccgatgtggcgatggggctaccgccccggtggtgggagacgagactggttgggggtggtgttgagggcgtgggatcagggtgaaggcagccaaactggccgggatgaggatgacggccgcgccgacacttcggagcgaggtcatgtgacgatccttcggtagctcgacgggttgccgtagatcttttccacgttgatgccactatgtgggttgtcggcgctaaccatttggcctccaccgatgtagacggccacgtggtgggcagggcttccccagaggatgaggtcgccgactttgagctggtcacgggccacagcagtgccgactttctgctggtcggcggcggtgcggggaaggctaatgccgatacgccggtacagcgccgaggtcaggcctgagcagtcgtagccgccatcggctttgccgttaccaccccacacgtaggcgtaggagttgttgtcggcgatcgatttggcccatgccacggcttcggccaggttcttcgacacaccggtctcgttagcggccccggtggcacagttgtttgacaggtgccctgtagtagtggatcccactatttgtttggccatggtttcccatttggcgtaggcatcgggcagggctgagccttgcactgcctgagctgcctgcgtcagcggcatcttctgccagtcagcgatgtcgactaaaccgggaatgtggaatccagggccgccggccgatccggggccagcgtaggtgatggtgtggcctttcaagaacgcctcggtggcgtaggcatcattgttgacctgatccagagtcccgtaccagcccggcaggatgcgctgctgaaaggggccggcgtcaccgtcaccgttagccttcgctgaggtagggtcggccccaagatctgattcttgtttggcggtcatgatagcgatgaccgctgcctgggtaggcagtttgtcacgctggaccacagtgacgatggtggtcacgagctgcttctgcctggccgtgaggcctccggcacccacagtgcctccggtgacggtacccacgcaagcatccccgccgacactgccaccgccgccgccagagttgtcgtcgagggccccagagcctactgacagcagcggcacaatgatcacggtcgctggcaagaccgccaggcccgccagcatcagcactgctgcactcaccacggcgatcacgtgagatgctttcaacgctgcccacctctcgctggtttgagggggcgacgcctgctggtacgcacaggcttggttgatccagtccgccgttgattggcaggcctgggtttgatcggcttgctgggacccggtttgggctccggagtcttaggctccggcttcacatgcctaggcacttcggctgcggtgggaggagtcagcacgtggcgtaccggcttggtgaccttctgggcacccgaaacaaccggcttagacaccaccttggcacctttgaccaccggtgcggctgccttcgcgccggccttcttgactgcacgatgcgctttgatagccccggcctcggcccggccaaccctactagcagtagcatcgagggctctgtggcccgtcgttgccctcaccggtgcatccttgccctggcgggtctgcttcgcgatcgccgacatgccgcctcgcaatgccgaaacatgattgtgggcgtgggcgatcgccgacatgccggccgtcgcgatttttgactggccctgcggggcccctgccccagcacgaatctgccggtaagccgccgacgtgccacgagcacccgccgccattcgcgccaccttcgcagccctagtcactcccgtcgacacgccacccgtggctaccgcagcagcacccgagaccacagtcgaggccatccgccttcgacccgatccggtgagcttgcgaccaccactgcgcaccatccggcgagcaccccgcccagcccactggccgatcaccgagcccctttcggaacgcttgctgcgcatccaatcgttgatcttgtccctcagccccttctcgcccttgtgacgacgccacatggacatcaagaacccgataatccc

SEQ ID NO: 243 - DNA, 4903 bp, Propionibacterium acnes
  source 1..4903: mol_type = genomic DNA
gcgataccgcaaggctgtgtgggatcagctgttcgggatggggcggttgcagccgctgttcgaaatcagcgacgccgaaaacatcatcgtggtgggtaaccatgaggtggttgtcgaccacaacgatggttcccggtcaacgctgccgccggtggccgactcggatgccgagctggaatcccagatcgcccggatggcgaggaatgcgaccccgcggcgagccttcgacgccgatcacaccgatgtgacgatcatgcaccaacagaagttccgtatccacgcgatctcttcggaggtgtcgttgcaaccgtcggtggtcatccgccaacatttgctcacccaaatcagtctgggggacctgtcccagcggggaatgatgccggtggaagtggcccggttcctcgatgaggcggtacaagctggcaagtccatcgtggtcgccggcgagcagggggcaggcaagacgacgtttttacgagcgttgatccacgccattccgatgcgggagcggttcgccacgttggagaccgatcaggagttgttcgctcatctgatgcctggccgggaaaacacgctggtgctgttcgcccgtgatggtaacggcgaggtggatccggcgactggcacccagcacggcgctatcgagatcgcccagctgattcctcctagcctgcgccaggcgttaactagggtcattgtcggtgaggtgcgcggcaatgaggcttcggccatgttccaggctatgcagtcggggactggcactatgagcagtatccactccccgcgagcctctgaggtgccgtcccggctagcccaaatgatttcgatgggcccggtctacgatctggatcaggccatgctgcagatcggtcattcgatcgactacatcgtctttgttcgtaagcgtgacctgcctgatgggagccggctgcgatttgttgagcagatccgttcagtctcgcctggtgattcgacaactcccagtcttggcgaggtgtacacggctgactcgtggacaggccagccgcttacgccactcatgcctggttcggccgccgacgagctgtctcacttcgcccgagacctggattactgcgaggcccactcatgaacactcccgcactaaccagcgccctcatcgtgaccgggctagggctgatcctggccatcgacgggctggtcccggcgccgcctcgacctggtgccccgctgagcccggcccaaaggtgggctcggctcacccaccgtcccactggtgcggccgggcgccgccgggacctgcgttgggggttggctgttcttgtcggtgtcgtgctgtttgtgctcaccgggtgggtggctgcgctggcgctgggccccatcattgtgttgttggcccccaccctgctgggggcggccccaccgaccgatattccgctgatggaggcgttggatcggtgggtgcgtcaggtcgctgcggtgctgccacaggggcgagacatcatcacagcggtgcggatctcacggccgcgggccccgaagctgatcgccgggtcggtggatcaactggtgtcccggttggatggccgtatggagccgagggaggcgttccagcggatggccgacgagctggactcggctgaggctgacgcggtgctggcctcactagcgttggcggccactcatccgcggggagcctcgacaacgttgaaggctattgctggcaacatccaacagcggttgaaagtgctgcggcaggtggaggctgagcggtctaagccgcgtaactcggtgcgccagatcacactggtcacgatcgccatgttcggggggctgctcgtgatcggacggtcgtttctggccccgctggcgacccctcccggtcaggtgctggtggccgtggcggtggtcatgtatgtcatcgcactagtgcagatgtatcggatggcgcggccccgtcgacgcacccggatcatggtcaggaggacccgatgaccattactgctttgtccctgctggccggggccatcgtcactgtcggactgctggtcatcgtggcagcgttccgcccagccccaggccctgacctggttgccgctctggaggtggtgtcgggtcgcacctcaagcgtcgccgagaacgtcgaccagacccggatcgggcggataggtcgcagcgtgacccgcacattccatgtgtcggtgtccccggccatgcgggccgcactgcgactccaaggcacgacccccgaagcgttctacggtcgacgcctgatctgcgcactgatcggggcgatcctgccgtggctgctcaacgcggtagccatcgcggtaggggcgaattccccgaacctactcatcccttcggcgctgtgtgtggcgttagctggcgctggatggatgctgccggcagcacggttgaaggctgcggccgggcccaccaacgatgactcgttcgaagcgctgctggtattcatcgatttggtcgtgctggaacggctcgccaacgaaacctccgtcgacgcgctcaccaatgcggcaaacatgtcggactcgccgctattcgtccagatccgtcaagtcctcaaccgtgcctccctggaaaacgtcgacccgtggaacgggctagaccggctagccgaggacatcaaactgcccgaactcaccgatgtggtctccatcgcccgcctccaaaacgaaggcgcctccctcgtcgacagtttccgggcccgagtcgccgagttgcgcgacgcctacctgctgcgcctgcaacaagaatccaccgccatcacccagcggcttggtttgtggacgatcctgcaagccggctcggtcatgctcatcttgctgggggcggccgccctcacactcatcacagccggataaaccgacatcgtgtcgagcccccatatgggccgcgaacctttcataatgatgcctgtaagcaccacaatattgatcacaacctaacaatgaaggagaaatcatgatgaccgatctcgacctggctaaaaaacagatcacctggctggcggcgcacctgcgttcccggatcgttgacgagcgtggcggtggtagctctaccgtggagacactgatttggattggtgtcatcgtggcgctggtgattggtgtgggcgtcggggtgacggcctatatcaggtcgaagatgcctcactgacgacgatgcgtagcaggttcacaactgatcagcgtggcggtggtagcgcgtcggtggggatgctcctgctgatgcctgcgatcatgctgctggcattcggtgggatcgaggtcgggatgtggtgtcacgcccatcagtcgaccatcgcggcagcccaaagcgccgcggaggctcagcgtgtcgtccatccggtcccggggtcggcacaggaggcagcctcgcagatcactagtcatggcggggtgcgtgatacccggatatcggtcagtgatgacggggccactgtcacggtgaccgtctcaggtcgggccccatcgatgctggggctgcatcttccggctgtgtcgtcgacagcgtcgatgcccaaggagcgcctgtcgtgaggcgaagtgagcgcggtggagcaagtctaagcgtcgaggtgctcatgtgggcgccgatcgcgctggtgatcatcgggtttgttgtgggtatcggccggatgtcgatggcccaggacgcggtgagtggcgcggcgggtgctgcggcccgtgcggcgtcgttggagcgtgatggacagtcggctcagtctgcggcgcagcaggcggcgtcggcgaacctgtcgtccggtgggctggcatgtgcgccgagtgtgagcgtggacacgtcagtgtttgcccgtcctgccgggcaggcgggcacggttcacgccacggtcacgtgtgtcacctcgctgggtcttgggttcgggtcccggacggtgcacgcaacggggtctgccccggtagacacctatcgggaaaggagaggctgagatggcccgtgatgagcgtggtggcggctcggtgtcggtgtggatgctgctcatggtgccggtgattctggtcatggccggcctggtttttgacgggtcccgtcagatatcggcaacccaggcggcccaggacgcggcggttgcggcatcccgcgccggaactgatgcggcagcgacaccgcagcttgctggccacgacggggcggccgtagcagtccaagcggcccgccaggcactatctgctgccggggtggacgggtcggtgcaggaggacgggtcgaccatcacggtgaccacgtctcaaagtcggccgacagtgttcctgtcagcgatcggaatcagccaggtaagggggcatgggcaggcccatgctcagcttgtgggaccgggagaacgcccatgacagtgatacgtcgtatcggtgccctggtggcactgctggtggtgatagccggcttaccggccgggctcgtggccgcaggcgccccgctagtaccctcgggcctgtcatgggcccatgtgcggcatctgttggttaccccagacatgaccgggtcggtgctggtgtggctggtcagcctcatcggctggatcgggtgggcatggttcgccctggccgtcgcagccgaagcggtgacgatgctctcagggcagcggctgcactggcacatgcccggccctcgcctagtgcgccgagtggcagccggtcttctcattgccgcgttcgcggccgcaccggcagccacaagcacggctcacgccgccgaggccacccatgtggcggtcgccgcccaggctggaccggcacacgcggccggcacccaggacagccccgccaccacctctcaggccccggacgcctccaccactccgaaaatctggaagacctacacggtgcgggccaacgactacctgtggaagatcgccgagcactactacggtgacggcgcc

SEQ ID NO: 244 - DNA, 4609 bp, Propionibacterium acnes
  source 1..4609: mol_type = genomic DNA
gataccgcaaggctgtgtgggatcagctgtgccgctctcccgacatggcagacagcaccctgcggactgactgacactgtggcgccgcggaggtctcccgcggcgtccgctggggcgagtgcatgcctgtcagctcatcttttatcgtcatgtttccccttgtcagagcggtctttgcaaagtgacaacgtcaggggtcttgacgacaacatcctcgacaacatcgtggcggtggtctgtgtctcgtcagttcaacgcaccggggaaagaggcaccgctgatgttcaccaccacaaacaccctcaacgatgagtgggaccagattcgcgccactgagatcgattggcatgactgccctgaactgatgcactgcatcgacgttgatgatgtgttggccgtcattcctgccgcccccgacgccatcttgggctacctcattgcccgggctcagggcggtgacgagttggccacccgcactatcatccaagcgttcacaggcaagcttatcttgatggccacggccaccaaggtgcgccgtactaatgacggcttcaatgatctgttggcgggtctgtgggagacgatcatcacgtacccgttggatcgtcgccctgacaagatcgctgcgaacctcatcctcgacacgttgcaccgggttacccggttctggcgtgctgattcccccgatgaggaagaggctcacggtctggtgcccttccctgacactctcatcgccccagagcccgatgaggacgtcacagctagccaggccatcgccttggcggtggaccgcaactggattaccgaggacctagcccgcctcatgagccatatttactgtgacggtatgactggagctgatgcgggtcgtctgcatggctgcgctccagctacggtgcgatctcgatgccgtgatggtcgggccgtgttgcagcgcaacgccgagacgatcctggccgtctgctgatccctctcttgctcatgcctgccgccaccctacccctacctgctagaaacatagccatgtctccagcaacgcatctagcgtatcttctagcaattgatctagctatgtatatagctgatgatctagctaccatatagctgtgtctccagcccaaaggacagcccaatggcatgcttgccacaggaaggtgcgtcagcctcccgaaatactggaaggagctttaccgtgcaggacatgacctcgaccagaccgattgaccgatccccgttcgaccgcactattgcggtgtggaaccacaaaggcggcacgttcaagacgtccgtcgtggcgaacctgggatacctgttcgccgccggtggcaacaaggtgctgctggtcgacatggacccccaggccaatctcgacattgacttcggtatacccgcgggagaacgtgaacggggcatgggattagccgaggcgctacgtgaggggacggcccttcccccaccgcagcatctcagcgaaaaccttcacctggtcagtggcggcgctgctctcaacgagttcaccgaccccgcatccttagcggccatcctcgaccgagtcaccaccgcacgctacgacctgctagctcaggcccttgccccgctggcctgggactatgacctcatcttcatcgactccgggccggcacaaactctgctgtcccagaccatccttggagtagcccgctggctggtagtgcccacccgcaccgataacgcctcaatcactggcctcgtcgacgttcaagacgccatcgacggggttgcctcctgcaaccctgaccttcaactactcggcgttgtcctagccggcgtgggggcccgggccacccggatcgccgcagataaacgccacgccatcgacacagtgctgggggcaggaaccgttttcgatgcggtcatccactactccgagaaggtgtccgtgctcgcacgccagcagggcaagaccgtcgccgagctagccaacgagtaccacaacacccagcccgcctacacctacctagctaaaggccagaacatccccaacgtcgccaaggcagccgtcagcatcgaaactgattatctgaggctggccaccgagatcagcgaccgcatgttcaccagcgacgagcaggagcctgatcatgactgacgatccgactccatccgagcagaacaaccccaccagcgacgacatgcgcttggccgaagaatgggccaacagcggccgcacagtgggagccctgccgcgccgtcaacggcctcagcgacccacaccccgcaccaccagccaaccccctgtctcgtcccctgacacaccggctccgaaaaaaccccagaagacccccaccagccagcctggccgtcaacggatcaacgtcaccgtctacgttgtgcccgaactccatgagcggctgcgctcccgatcggcggcgacgggggtgacggtctcggatctggtggtgcatgcgttagcgttcgtcgccgatcatgcgggggaggcgatcgccgatgatctgcgcgtcgagacgggccccggcatgggggccggactgttcgatgtgaccccatcgcggccagtaggggtcgccaaaacccagctgggggtgcgaatgacccgccacaacaaggatggtttggaccagctgacccggacgagtggagcccgtgaccgcagccatcttgtgtctgtcgccgtgcgcgactatctcgactccaaccctgtaaagaaaggccgacatgtccgctgatgaaactcctgccgcccggggtgggcgacgctttgatacgaccgtcaagcccaggcgccgtcccatgcttatcgccgccggtatcgccatcgtgatagtcggcgcgctcctcatcactcagttgattcgctccgcccaaaccgagcatcgcgtgctggaagtccacgccgatgtggctcgcggcgaggtcatccgtgacaccgatctggtatcggtgactgtcggccaggtcgacaacgtatcaacggttcccgcagaccagctcgactcactggtcggcaaacgcgccacggcagatcttcgagccggatcactcttgcctgctggggctatcggcccggccgatgtcgttccagctccgggcaagtcgctggtcgggctgaagctagccgccggacagatccctatcggagaccttgctgtcgggacgaagctgcgcctgatccagacgtcggcacccagcggctcatccaccaccactgatagcagcaccaataccgatggccagtcgtgggaggcaacaatggcgaccggcaccaaaaagaccgagcaggtcaccttgatcaacgccgaagtgaactcgcgtgatgccgcccggatcgcccaactgacgtcacagggccgtatcgccgtagtgaaggatccgatccgatgagcaccattgttttgaccagcgtctcgggagccccaggggtcaccacgacagcgatcgggctgggcagggtctggccacaatcgagcctggtcgtcgaggatgacacccaccacgccatgctggcgggctacctgcgagcctcccagcacgccgaaccgaacctggccgcagtggcgaacctgacgtcgactccaaccaacgcccaaacggtgtgggaatctatcgccagacccctacccaccgatgacccagtcggcgggctgcgacgcaaaggcatcctcggcccgcccacgccgtggtctcgcgcaggcatcgacccccgatggggattcatgctggccctgtggcggcaactggaggaggctggcatcgacaccatcatcgatttgggtcgcctagccacaccactgacctcaacgccacacctgatcgccgcacccatcgtcgaggacgccgacatgatcttggtgatgatcgaggcgacactacgcgacatcgccggcgcccgcacgatggtggagggactcgctgagcagatgaacttggccggcgcctaccgacgtctcggactgcttgtccaccgtggcggccaggcccgcggcgtcgccgagttcaatgacaaggagatcacctcggcgttacgactcccggtcatcggggccattacccacgacccggccggagccgcccaactctccgacggggtcgggcagcggttcgacaagtcacgtctggcccactcactatcaaaggtggcggccagcctcgtcgatgccataaacaagcgccacgctgatgacgaggaggatctgtgatggccagttttgctgataatccgttcgacaagctgcgctcccaggatgcggcaagagcttcggtagagcaggagcctgatgccggattagcgtcggagttgttttcgacgtcgtcggggtgggccagctctcagcaggtgtcccaagctcaaccggtgatgacccgttcggagaacgtggattggccggttgtcgcggagctagccagtacggccactgatgaggttgaggctgagatcagcaggtggagttccactcatgatggggtggcgacgctagacattcgccaggccatcgcggagcctgctattgcctcggcggtgtctacgtatgctgaccgacgccagatcgatgtaggggagacctggcctgatctggtacgccagcgataccgcaaggctgtgtgggatcag

SEQ ID NO: 245 - DNA, 4613 bp, Propionibacterium acnes
  source 1..4613: mol_type = genomic DNA
gcgataccgcaaggctgtgtgggatcagctgtgccgctctcccgacatggcagacagcaccctgcggactgactgacactgtggcgccgcggaggtctcccgcggcgtccgctggggcgagtgcatgcctgtcagctcatcttttatcgtcatgtttccccttgtcagagcggtctttgcaaagtgacaacgtcaggggtcttgacgacaacatcctcgacaacatcgtggcggtggtctgtgtctcgtcagttcaacgcaccggggaaagaggcaccgctgatgttcaccaccacaaacaccctcaacgatgagtgggaccagattcgcgccactgagatcgattggcatgactgccctgaactgatgcactgcatcgacgttgatgatgtgttggccgtcattcctgccgcccccgacgccatcttgggctacctcattgcccgggctcagggcggtgacgagttggccacccgcactatcatccaagcgttcacaggcaagcttatcttgatggccacggccaccaaggtgcgccgtactaatgacggcttcaatgatctgttggcgggtctgtgggagacgatcatcacgtacccgttggatcgtcgccctgacaagatcgctgcgaacctcatcctcgacacgttgcaccgggttacccggttctggcgtgctgattcccccgatgaggaagaggctcacggtctggtgcccttccctgacactctcatcgccccagagcccgatgaggacgtcacagctagccaggccatcgccttggcggtggaccgcaactggattaccgaggacctagcccgcctcatgagccatatttactgtgacggtatgactggagctgatgcgggtcgtctgcatggctgcgctccagctacggtgcgatctcgatgccgtgatggtcgggccgtgttgcagcgcaacgccgagacgatcctggccgtctgctgatccctctcttgctcatgcctgccgccaccctacccctacctgctagaaacatagccatgtctccagcaacgcatctagcgtatcttctagcaattgatctagctatgtatatagctgatgatctagctaccatatagctgtgtctccagcccaaaggacagcccaatggcatgcttgccacaggaaggtgcgtcagcctcccgaaatactggaaggagctttaccgtgcaggacatgacctcgaccagaccgattgaccgatccccgttcgaccgcactattgcggtgtggaaccacaaaggcggcacgttcaagacgtccgtcgtggcgaacctgggatacctgttcgccgccggtggcaacaaggtgctgctggtcgacatggacccccaggccaatctcgacattgacttcggtatacccgcgggagaacgtgaacggggcatgggattagccgaggcgctacgtgaggggacggcccttcccccaccgcagcatctcagcgaaaaccttcacctggtcagtggcggcgctgctctcaacgagttcaccgaccccgcatccttagcggccatcctcgaccgagtcaccaccgcacgctacgacctgctagctcaggcccttgccccgctggcctgggactatgacctcatcttcatcgactccgggccggcacaaactctgctgtcccagaccatccttggagtagcccgctggctggtagtgcccacccgcaccgataacgcctcaatcactggcctcgtcgacgttcaagacgccatcgacggggttgcctcctgcaaccctgaccttcaactactcggcgttgtcctagccggcgtgggggcccgggccacccggatcgccgcagataaacgccacgccatcgacacagtgctgggggcaggaaccgttttcgatgcggtcatccactactccgagaaggtgtccgtgctcgcacgccagcagggcaagaccgtcgccgagctagccaacgagtaccacaacacccagcccgcctacacctacctagctaaaggccagaacatccccaacgtcgccaaggcagccgtcagcatcgaaactgattatctgaggctggccaccgagatcagcgaccgcatgttcaccagcgacgagcaggagcctgatcatgactgacgatccgactccatccgagcagaacaaccccaccagcgacgacatgcgcttggccgaagaatgggccaacagcggccgcacagtgggagccctgccgcgccgtcaacggcctcagcgacccacaccccgcaccaccagccaaccccctgtctcgtcccctgacacaccggctccgaaaaaaccccagaagacccccaccagccagcctggccgtcaacggatcaacgtcaccgtctacgttgtgcccgaactccatgagcggctgcgctcccgatcggcggcgacgggggtgacggtctcggatctggtggtgcatgcgttagcgttcgtcgccgatcatgcgggggaggcgatcgccgatgatctgcgcgtcgagacgggccccggcatgggggccggactgttcgatgtgaccccatcgcggccagtaggggtcgccaaaacccagctgggggtgcgaatgacccgccacaacaaggatggtttggaccagctgacccggacgagtggggcccgtgaccgcagccatcttgtgtctgtcgccgtgcgcgactatctcgactccaaccctgtaaagaaaggccgacatgtccgctgatgaaactcctgccgcccggggtgggcgacgctttgatacgaccgtcaagcccaggcgccgtcccatgcttatcgccgccggtatcgccatcgtgatagtcggcgcgctcctcatcactcagttgattcgctccgcccaaaccgagcatcgcgtgctggaagtccacgccgatgtggctcgcggcgaggtcatccgtgacaccgatctggtatcggtgactgtcggccaggtcgacaacgtatcaacggttcccgcagaccagctcgactcactggtcggcaaacgcgccacggcagatcttcgagccggatcactcttgcctgctggggctatcggcccggccgatgtcgttccagctccgggcaagtcgctggtcgggctgaagctagccgccggacagatccctatcggagaccttgctgtcgggacgaagctgcgcctgatccagacgtcggcacccagcggctcatccaccaccactgatagcagcaccaataccgatggccagtcgtgggaggcaacaatggcgaccggcaccaaaaagaccgagcaggtcaccttgatcaacgccgaagtgaactcgcgtgatgccgcccggatcgcccaactgacgtcacagggccgtatcgccgtagtgaaggatccgatccgatgagcaccattgttttgaccagcgtctcgggagccccaggggtcaccacgacagcgatcgggctgggcagggtctggccacaatcgagcctggtcgtcgaggatgacacccaccacgccatgctggcgggctacctgcgagcctcccagcacgccgaaccgaacctggccgcagtggcgaacctgacgtcgactccaaccaacgcccaaacggtgtgggaatctatcgccagacccctacccaccgatgacccagtcggcgggctgcgacgcaaaggcatcctcggcccgcccacgccgtggtctcgcgcaggcatcgacccccgatggggattcatgctggccctgtggcggcaactggaggaggctggcatcgacaccatcatcgatttgggtcgcctagccacaccactgacctcaacgccacacctgatcgccgcacccatcgtcgaggacgccgacatgatcttggtgatgatcgaggcgacactacgcgacatcgccggcgcccgcacgatggtggagggactcgctgagcagatgaacttggccggcgcctaccgacgtctcggactgcttgtccaccgtggcggccaggcccgcggcgtcgccgagttcaatgacaaggagatcacctcggcgttacgactcccggtcatcggggccattacccatgacccggccggagccgcccaactctccgacggggtcgggcagcggttcgacaagtcacgtctggcccactcactatcaaaggtggcggccagcctcgtcgatgccataaacaagcgccacgctgatgacgaggaggatctgtgatggccagttttgctgataatccgttcgacaagctgcgctcccaggatgcggcaagagcttcggtagagcaggagcctgatgccggattagcgtcggagttgttttcgacgtcgtcggggtgggccagctctcagcaggtgtcccaagctcaaccggtgatgacccgttcggagaacgtggattggccggttgtcgcggagctagccagtacggccactgatgaggttgaggctgagatcagcaggtggagttccactcatgatggggtggcgacgctagacattcgccaggccatcgcggagcctgctattgcctcggcggtgtctacgtatgctgaccgacgccagatcgatgtaggggagacctggcctgatctggtacgccagcgataccgcaaggctgtgtgggatcagct

SEQ ID NO: 246 - DNA, 4903 bp, Propionibacterium acnes
  source 1..4903: mol_type = genomic DNA
gcgataccgcaaggctgtgtgggatcagctgttcgggatggggcggttgcagccgctgttcgaaatcagcgacgccgaaaacatcatcgtggtgggtaaccatgaggtggttgtcgaccacaacgatggttcccggtcaacgctgccgccggtggccgactcggatgccgagctggaatcccagatcgcccggatggcgaggaatgcgaccccgcggcgagccttcgacgccgatcacaccgatgtgacgatcatgcaccaacagaagttccgtatccacgcgatctcagcggaagtgtcattgcaaccgtcggtggtcatccgccaacatttgctcacccaaatcagtctgggggacctgtcccagcggggaatgatgccggtggaagtggcccggttcctcgatgaggcggtacaagctggcaagtccatcgtggtcgccggcgagcagggggcaggcaagacgacgtttttacgagcgttgatccacgccattccgatgcgggagcggttcgccacgttggagaccgatcaggagttgttcgctcatctgatgcctggccgggaaaacacgctggtgctgttcgcccgtgatggtaacggcgaggtggatccggcgactggcacccagcacggcgctatcgagatcgcccagctgattcctcctagtctgcgccaggcgttaactagggtcattgtcggtgaggtgcgcggcaatgaggcttcggccatgttccaggctatgcagtcggggactggcactatgagcagtatccactccccgcgagcctctgaggtgccgtcccggctagcccaaatgatttcgatgggcccggtctacgatctggatcaggccatgctgcagatcggtcattcgatcgactacatcgtctttgttcgtaagcgtgacctgcctgatgggagccggctgcgatttgttgagcagatccgttcagtctcgcctggtgattcgacaactcccagtcttggcgaggtgtacacggctgactcgtggacaggccagccgcttacgccactcatgcctggttcggccgccgacgagctgtctcatttcgcccgagacctggattactgcgaggcccactcatgaacactcctgcactaaccagcgccctcatcgtgaccgggttggggctgatcctggccatcgacgggctggtcccggcgccgcctcgacctggtgccccgctgagcccggcccagaggtgggctcggctcacccaccgtcccacaggagcggccgggcgtcgccgggatttgcgttgggggttggctgttctcgtcggcgtcgtgctgtttgtgctcaccgggtgggtggctgcgctggcgttgggccccatcattgtgttgttggcccccaccctgctgggggcggccccaccgaccgatattccgctgatggaggcgttggatcggtgggtgcgtcaggtcgctgcggtgctgccacaggggcgagacatcatcacagcggtgcggatctcacggccgcgggccccgaagctgatcgccgggtcggtggatcaactggtgtcccggttggatggccgtatggagccgagagaggcgttccagcggatggccgacgagctggactcggctgaggctgacgcggtgctggcctctctggcgttggcggccactcatccgcggggagcctcgacaacgttgaaggctattgctggcaacatccaacagcggttgaaagtgctgcggcaggtggaggctgagcggtctaagccgcgtaactcggtgcgccagatcacactggtcacgatcgccatgttcggggggctgctcgtgatcggacggtcgtttctggccccgctggcgacccctcccggtcaggtgctggtggccgtggcggtggtcatgtatgtcatcgcactagtgcagatgtatcggatggcgcggccccgtcgacgcacccggatcatggtcaggaggacccgatgaccattactgctttgtccctgctggccggggccatcgtcactgtcggactgctggtcatcgtggcagcgttccgcccagccccaggccctgacctggttgccgctctggaggtggtgtcgggtcgcacctcaagcgtcgccgagaacgtcgaccagacccggatcgggcggataggtcgcagcgtgacccgcacattccatgtgtcggtgtccccggccatgcgggccgcactgcgactccaaggcacgacccccgaagcgttgtacggtcgacgcctgatctgcgcactgatcggggcgatcctgccgtggctgctcaacgcggtagccatcgcggtaggggcgaattccccgaacctactcatcccttcggcgctgtgtgtggcgttagctggcgctggatggatgctgccggcagcacggttgaaggctgcggccgggcccaccaacgatgactcgttcgaagcgctgctggtattcatcgatttggtcgtgctggaacggctcgccaacgaaacctccgtcgacgcgctcaccaatgcggcaaacatgtcggactcgccgctattcgtccagatccgtcaagtcctcaaccgtgcctccctggaaaacgtcgacccgtggaacgggctagaccggctagccgaggacatcaaactgcccgaactcaccgatgtggtctccatcgcccgcctccaaaacgaaggcgcctccctcgtcgacagtttccgggcccgagtcgccgagttgcgcgacgcttacctgctgcgcctgcaacaagaatccaccgccatcacccagcggcttggtttgtggacgatcctgcaagccggctcggtcatgctcatcttgctgggggcggccgccctcacactcatcacagccggataaaccgacatcgtgtcgagcccccatatgggccgcgaacctttcataatgatgcctgtaagcaccacaatattgatcacaacctaacaatgaaggagaaatcatgatgaccgatctcgacctggctaaaaaacagatcacctggctggcggcgcacctgcgttcccggatcgttgacgagcgtggcggtggtagctctaccgtggagacactgatttggattggtgtcatcgtggcgctggtgattggtgtgggcgtcggggtgacggcctatatcaggtcgaagatgcctcactgacgacgatgcgtagcaggttcacaactgatcagcgtggcggtggtagcgcgtcggtggggatgctcctgctgatgcctgcgatcatgctgctggcattcggtgggatcgaggtcgggatgtggtgtcacgcccatcagtcgaccatcgcggcagcccaaagcgccgcggaggctcagcgtgtcgtccatccggtcccggggtcggcacaggaggcagcctcgcagatcactagtcatggcggggtgcgtgatacccggatatcggtcagtgatgacggggccactgtcacggtgaccgtggtgggccgggccccatcgatgctggggctgcatcttccggctgtgtcgtcgacagcgtcgatgcccaaggagcgcctgtcgtgaggcgaagtgagcgcggtggagcaagtctaagcgtcgaggtgctcatgtgggcgccgatcgcgctggtgatcatcgggtttgttgtgggtatcggccggatgtcgatggcccaggacgcggtgagtggcgcggctggtgctgcggcccgtgcggcgtcgttggagcgtgatggacagtcggctcagtctgcggcgcagcaggcggcgtcggcgaacctgtcgtccggtgggctggcatgtgcgccgagtgtgagcgtggacacgtcagtgtttgcccgtcctgccgggcaggcgggcacggttcacgccacggtcacgtgtgtcacctcgctgggtcttgggttcgggtcccggacggtgcacgcaacggggtctgccccggtagacacctatcgggaaaggagaggctgagatggcccgtgatgagcgtggtggcggctcggtgtcggtgtggatgctgctcatggtgccggtgattctggtcatggccggcctggtttttgacgggtcccgtcagatatcggcaacccaggcggcccaggacgcggcggttgcggcatcccgcgccggaactgatgcggcagcgacaccgcagcttgctggccacgacggggcggccgtagcagtccaagcggcccgccaggcactatctgctgccggggtggacgggtcggtgcaggaggacgggtcgaccatcacggtgaccacgtctcaaagtcggccgacagtgttcctgtcagcgatcggaatcagccaggtgaccgggcatgggcaggcccatgctcagcttgtgggaccgggagaacgcccatgacagtgatacgtcgtatcggtgccctggtggcactgctggtggtgatagccggcttaccggccgggctcgtggccgcaggcgccccgctagtaccctcgggcctgtcatgggcccatgtgcggcatctgttggttaccccagacatgaccgggtcggtgctggtgtggctggtcagcctcatcggctggatcgggtgggcatggttcgccctggccgtcgcagccgaagcggtgacgatgctctcagggcagcggctgcactggcacatgcccggccctcgcctagtgcgccgagtggcagccggtcttctcattgccgcgttcgcggccgcaccggcagccacaagcacggctcacgccgccgaggccacccatgtggcggtcgccgcccaggctggaccggcacacgcggcccccgcccaggacagccccgccaccacctctcaggccccggacgcctccaccactccgaaaatctggaagacctacacggtgcgggccaacgactacctgtggaagatcgccgagcactactacggtgacggcgcc

SEQ ID NO: 247 - DNA, 4612 bp, Propionibacterium acnes
  source 1..4612: mol_type = genomic DNA
gcgataccgcaaggctgtgtgggatcagctgtgccgctcccccgacatggcagacagcaccctgcggactgactgacactgtggcgccgcggaggtctcccgcggcgtccgctggggcgagtgcatgcctgtcagctcatcttttatcgtcatgtttccccttgtcagagcggtctttgcaaagtgacaacgtcaggggtcttgacgacaacatcctcgacaacatcgtggcggtggtctgtgtcttgtcagttcaacgcaccggggaaagaggcaccgctgatgttcaccaccacaaacaccctcaacgatgagtgggaccagattcgcgccactgagatcgattggcatgactgccctgaactgatgcactgcatcgacgttgatgatgtgttggccgtcattcctgccgcccccgacgccatcttgggctacctcattgcccgggctcagggcggtgacgagttggccacccgcactatcatccaagcgttcacaggcaagcttattttgatggccacggccaccaaggtgcgccgtactaatgacggcttcaatgatctgttggcgggtctgtgggagacgatcatcacgtacccgttggatcgtcgccctgacaagatcgctgcgaacctcatcctcgacacgttgcaccgggttacccggttttggcgtgctgattcccccgatgaggaagaggctcacggtctggtgcccttccctgacactctcatcgccccagagcccgatgaggacgtcacagctagccaggccatcgccttggcggtggaccgcaactggattaccgaggacctagcccgcctcatgagccatatttactgtgacggtatgactggagctgatgcgggtcgtctgcatggctgcgctccagctacggtgcgatctcgatgccgtgatggtcgggccgtgttgcagcgcaacgccgagacgatcctggccgtctgctgatccctctcttgctcatgcctgccgccaccctacctctacctgctagaaacatagccatgtctccagcaacgcatctagcgtatcttctagcaattgatctagctatcatatagctgatgatctagctatcatatagctgtgtctccagcccaaaggacagcccaatggcatgcttgccacaggaaggtgcgtcagcctcccgaaatactggaaggagctttaccgtgcaggacatgacctcgaccagaccgattgaccgatccccgttcgaccgcactattgcggtgtggaaccacaaaggcggcacgttcaagacgtccgtcgtggcgaacctgggatacctgttcgccgccggtggcaacaaggtgttgatggtcgacatggacccccaggccaatctcgacattgacttcggtatacccgcgggagaacgtgaacggggcatgggattagccgaggcgctacgtgaggggacggcccttcccccaccgcagcatctcagcgaaaaccttcacctggtcagtggcggcgctgctctcaacgagttcaccgaccccgcatccttagcggccatcatcgagcgggtcaccaccgcacgctacgacctgctagctcaggcccttgccccgctggcctgggactatgacctcatcttcatcgactccgggccggcccaaactctgctgtcccagaccatccttggagtagcccgctggctggtagtgcccacccgcaccgataacgcctcaatcactggcctcgtcgacgttcaagacgccatcgacggggttgcctcctgcaaccctgaccttcaactactcggcgttgtcctagccggcgtgggggcccgggccacccggatcgccgcagataaacgccacgccatcgacacagtgctgggggcaggaaccgttttcgatgcggtcatccactactccgagaaggtgtccgtgctcgcacgccagcagggcaagaccgtcgccgagctagccaacgagtaccacaacacccagcccgcctacacctacctagctaaaggccagaacatccccaacgtcgccaaggcagccgtcagcatcgaaactgattatctgaggctggccaccgagatcagcgaccgcatgttcaccagcgacgagcaggagcctgatcatgactgacgatccgactccatccgagcagaacaaccccaccagcgacgacatgcgcttggccgaagaatgggccaacagcggccgcacagtgggagccctgccgcgccgtcaacggcctcagcgacccacaccccgcaccaccagccaaccccctgtctcgtcccctgacacaccggctccgaaaaaaccccagaagacccccaccagccagcctggccgtcaacggatcaacgtcaccgtctacgttgtgcccgaactccatgagcggctgcgctcccgatcggcggcgacgggggtgacggtctcggatctggtggtgcatgcgttagcgttcgtcgccgatcatgcgggggaggcgatcgccgatgatctgcgcgtcgagacgggccccggcatgggggccggactgttcgatgtgaccccatcgcggccagtaggggtcgccaaaacccagctgggggtgcgaatgacccgccacaacaaggatggtttggaccagctgacccggacgagtggagcccgtgaccgcagccatcttgtgtctgtcgccgtgcgcgactatctcgactccaaccctgtaaagaaaggccgacatgtccgctgatgaaactcctgccgcccggggtgggcgacgctttgatacgaccgtcaagcccaggcgccgtcccatgcttatcgccgccggtatcgccatcgtgatagtcggcgcgctcctcatcactcagttgattcgctccgcccaaaccgagcatcgcgtgctggaagtccacgccgatgtggctcgcggcgaggtcatccgtgacaccgatctggtatcggtgactgtcggccaggtcgacaacgtatcaacggttcccgcagaccagctcgactcactggtcggcaaacgcgccacggcagatcttcgagccggatcactcttgcctgctggggctatcggcccggccgatgtcgttccagctccgggcaagtcgctggtcgggctgaagctagccgccggacagatccctatcggagaccttgctgccgggacgaagctgcgcctgatccagacgtcggcacccagcggctcatccaccaccactgatagcagcaccaataccgatggccagtcgtgggaggcaacaatggcgaccggcaccaaaaagaccgagcaggtcaccttgatcaacgccgaagtgaactcgcgtgatgccgcccggatcgcccaactgacgtcacagggccgtatcgccgtagtgaaggatccgatccgatgagcaccattgttttgaccagcgtctcgggagccccaggggtcaccacgacagcgatcgggctgggcagggtctggccacaatcgagcctggtcgtcgaggatgacacccaccacgccatgctggcgggctacctgcgagcctcccagcacgccgaaccgaacctggccgcagtggcgaacctgacgtcgactccaaccaacgcccaaacggtgtgggaatctatcgccagacccctacccaccgatgacccagtcggcgggatgcgacgcaaaggcatcctcggcccgcccacgccgtggtctcgcgcaggcatcgacccccgatggggattcatgctggccctgtggcggcaactggaggaggctggcatcgacaccatcatcgatttgggtcgcctagccacaccactgacctcaacgccacacctgatcgccgcacccatcgtcgaggacgccgacatgatcttggtgatgatcgaggcgacactacgcgacatcgccggcgcccgcacgatggtggagggactcgctgagcagatgaacttggccggcgcctaccgacgtctcggactgcttgtccaccgtggcggccaggcccgcggcgtcgccgagttcaatgacaaggagatcacctcggcgttacgactcccggtcatcggggccattacccatgacccggccggagccgccgaactctccgacggggtcgggcagcggttcgacaagtcacgtctggcccactcactatcaaaggtggcggccagcctcgtcgatgccataaacaagcgccacgctgatgacgaggaggatctgtgatggccagttttgctgataatccgttcgacaagctgcgctcccaggatgcggcaagagcttcggtagagcaggagcctgatgccggattagcgtcggagttgttttcgacgtcgtcggggtgggccagctctcagcaggtgtcccaagctcaaccggtgatgacccgttcggagaacgtggattggccggttgtcgcggagctagccagtacggccactgatgaggttgaggctgagatcagccggtggagttccactcatgatggggtggcgacgctagacattcgccaggccatcgcggagcctgctattgcctcggcggtgtctacgtatgctgaccgacgccagatcgatgtaggggagacctggcctgatctggtacgccagcgataccgcaaggctgtgtgggatcagct

SEQ ID NO: 248 - DNA, 4896 bp, Propionibacterium acnes
  source 1..4896: mol_type = genomic DNA
gcgataccgcaaggctgtgtgggatcagctgttcgggatggggcggttgcagccgctgttcgaaatcagcgacgccgaaaacatcatcgtggtgggtaaccatgaggtggttgtcgaccacaacgatggttcccggtcaacgctgccgccggtggccgactcggatgccgagctggaatcccagatcgcccggatggcgaggaatgcgaccccgcggcgagccttcgacgccgatcacaccgatgtgacgatcatgcaccaacagaagttccgtatccacgcgatctcagcggaagtgtcattgcaaccgtcggtggtcatccgccaacatttgctcacccaaatcagtctgggggacctgtcacatcgcggaatgatgccggtggaagtggcccggttcctcgatgaggcggtacaagctggcaagtccatcgtggtcgccggcgagcagggggcaggcaagacgacgtttttacgagcgttgatccacgccattccgatgcgggagcggttcgccacgttggagaccgatcaggagttgttcgctcatctgatgcctggccgggaaaacacgctggtgctgttcgcccgtgatggtaacggcgaggtggatccggcgactggcacccagcacggcgctatcgagatcgcccagctgattcctcctagcctgcgccaggcgttaactagggtcattgtcggtgaggtgcgcggcaatgaggcctcggccatgttccaggccatgcagtcgggtacaggcaccatgagcagtatccactccccgcgagcctctgaggtgccgtcccggctagcccaaatgatttcgatgggcccggtctacgatctggatcaggccatgctgcagatcggtcattcgatcgactacatcgtctttgttcgtaagcgtgacctgcctgatgggagccggctgcgatttgttgagcagatccgttcagtctcgcctggtgattcgacaactcccagtcttggcgaggtgtacacggctgactcgtggacaggccagccgcttacgccactcatgcctggttcggccgccgacgagctgtctcacttcgcccgagacctggattactgcgaggcccactcatgaacactcccgcactaaccagcgccctcatcgtgaccgggctagggctgatcctggccatcgacgggctggtcccggcgccgcctcgacctggtgccccgctgagcccggcccaaaggtgggctcggctcacccaccgtcccactggtgcggccgggcgtcgccgggatttgcgttgggggttggctgttcttgtcggtgtcgtgctgtttgtgctcaccgggtgggtggctgcgctggcgctgggccccatcattgtgttgttggcccccaccctgctgggggcggccccaccgaccgatattccgctgatggaggcgctggatcgctgggtgcgtcaggtcgctgcggtgctgccacaggggcgcgacatcatcacagcggtgcggatctcacggccgcgggccccgaagctgatcgccgggtcggtggatcaactggtgtcccggttggatggccgtatggagccgagggaggcgttccagcggatggccgacgagctggactcggctgaggctgacgcggtgctggcctcactagcgttggcggccactcatccgcggggagcctcgacaacgttgaaggctattgctggcaacatccaacagcggttgaaagtgctgcggcaggtggaggctgaacggtctaagccgcgtaactcggtgcgccagatcacactggtcacgatcgccatgttcggggggctgctcgtgatcggacggtcgtttctggccccgctggcgacccctcccggtcaggtgctggtggccgtggcggtggtcatgtatgtcatcgcactagtgcagatgtatcggatggcgcggccccgtcgacgcacccggatcatggtcaggaggacccgatgaccattactgctttgtccctgctagccggggccatcgtcactgtcggactgctggtcatcgtggcagcgttccgcccagccccaggccctgacctggttgccgctctggaggtggtgtcgggtcgcacctcaagcgtcgccgagaacgtcgaccagacccggatcgggcggataggtcgcagcgtgacccgcacattccatgtgtcggtgtccccggccatgcgggccgcactgcgactccaaggcacgacccccgaagcgttctacggtcgacgcctgatctgcgcactgatcggggcgatcctgccgtggctgctcaacgcggtagccatcgcggtaggggcgaattccccgaacctactcatcccttcggcgctgtgtgtggcgttagctggcgctggatggatgctgccggcagcacggttgaaggctgcggccgggcccaccaacgatgactcgttcgaagcgctgctggtattcatcgatttggtcgtgctggaacggctcgccaacgaaacctccgtcgacgcgctcaccaatgcggcaaacatgtcggactcgccgctattcgtccagatccgtcaagtcctcaaccgtgcctccctggaaaacgtcgacccgtggaacgggctagaccggctagccgaggacatcaaactgcccgaactcaccgatgtggtctccatcgcccgcctccaaaacgaaggcgcctccctcgtcgacagtttccgggcccgagtcgccgagttacgcgacgcctacctgctgcgcctgcaacaagaatccaccgccatcacccagcggcttggtttgtggacgatcctgcaagccggctcggtcatgctcatcttgctgggggcggccgccctcacactcatcacagccggataaaacgacaccgtgtcgagcccccatatgggccgcgaacctttcataatgatgcctgtaagcaccacaatattgatcacaacctaacaatgaaggagaaatcatgatgaccgatctcgacctggctaaaaaacagatcacctggctggcggcgcacctgcgttcccggatcgttgacgagcgtggcggtggtagctctaccgtggagacactgatttggattggtgtcatcgtggcgctggtgattggtgtgggcgtcggggtgacggcctatatcaggtcgaagatgcctcactgacgacgatgcgtagcaggttcacaactgatcagcgtggcggtggtagcgcgtcggtggggatgctcctgctgatgcctgcgatcatgctgctggcattcggtgggatcgaggtcgggatgtggtgtcacgcccatcagtcgaccatcgcggcagcccaaagcgccgcggaggctcagcgtgtcgtccatccggtcccggggtcggcacaggaggcagcctcgcagatcactagtcatggcggggtgcgtgatgcgcggatatcggtcagtgatgacggggccactgtcacggtgaccgtctcaggtcgggccccatcgatgctggggctgcatcttccggctgtgtcgtcgacagcgtcgatgcccaaggagcgcctgtcgtgaggcgaagtgagcgcggtggagcaagtctaagcgtcgaggtgctcatgtgggcgccgatcgcgctggtgatcatcgggtttgttgtgggtatcggccggatgtcgatggcccaggacgcggtgagtggcgcggcgggtgctgcggcccgtgcggcgtcgttggagcgtgatggacagtcggctcagtctgcggcgcagcaggcggcgtcggcgaacctgtcgtccggtgggctggcatgtgcgccgagtgtgagcgtggacacgtcagtgtttgcccgtcctgccgggcaggcgggcacggttcacgccacggtcacgtgtgtcacctcgctgggtcttgggttcgggtcccggacggtgcacgcaacggggtctgccccggtagacacctatcgggaaaggagaggctgagatggcccgcgatgagcgtggtggcggctcggtgtcggtgtggatgctgctcatggtgccggtgattctggtcatggccggcctggtttttgacgggtcccgtcagatatcggcaacccaggcggcccaggacgcggcggttgcggcatcccgcgccggaactgatgcggcagcgacaccgcagcttgctggccacgacggggcggccgtagcagtccaagcggcccgccaggcactatctgctgccggggtggacgggtcggtgcaggaggacgggtcgaccatcacggtgaccacgtctcaaagtcggccgacagtgttcctgtcagcgatcggaatcagccaggtaagggggcatgggcaggcccatgctcagcttgtgggaccgggagaacgcccatgacagtgatacgtcgtatcggtgccctggtggcactgctggtggtgatagccggcttaccggccgggctcgtggccgcaggcgccccgctagtaccctcgggcctgtcatgggcccatgtgcggcatctgttggttaccccagacatgaccgggtcggtgctggtgtggctggtcagcctcatcggctggatcgggtgggcatggttcgccctggccgtcgcagccgaagcggtgacgatgctctcagggcagcggctgcactggcacatgcccggccctcgcctagtgcgccgagtggcagccggtcttctcattgccgcgttcgcggccgcaccggcagccacaagcacggctcacgccgccgaggccacccatgtggcggtcgccgcccaggctggaccggcacacgcggcccccgcccaggacagccccgccaccacctctcaggccccggacgcctccaccactccgaaaatctggaagacctacacggtgcgggccaacgactacctgtggaagatcgccgagcactactacggtga

SEQ ID NO: 249 - DNA, 4892 bp, Propionibacterium acnes
  source 1..4892: mol_type = genomic DNA
gataccgcaaggctgtgtgggatcagctgttcgggatggggcggttgcagccgctgttcgaaatcagcgacgccgaaaacatcatcgtggtgggtaaccatgaggtggttgtcgaccacaacgatggttcccggtcaacgctgccgccggtggccgactcggatgccgagctggaatcccagatcgcccggatggcgaggaatgcgaccccgcggcgagccttcgacgccgatcacaccgatgtgacgatcatgcaccaacagaagttccgtatccacgcgatctcagcggaagtgtcattgcaaccgtcggtggtcatccgccaacatttgctcacccaaatcagtctgggggacctgtcacatcgcggaatgatgccggtggaagtggcccggttcctcgatgaggcggtacaagctggcaagtccatcgtggtcgccggcgagcagggggcaggcaagacgacgtttttacgagcgttgatccacgccattccgatgcgggagcggttcgccacgttggagaccgatcaggagttgttcgctcatctgatgcctggccgggaaaacacgctggtgctgttcgcccgtgatggtaacggcgaggtggatccggcgactggcacccagcacggcgctatcgagatcgcccagctgattcctcctagcctgcgccaggcgttaactagggtcattgtcggtgaggtgcgcggcaatgaggcctcggccatgttccaggccatgcagtcgggtacaggcaccatgagcagtatccactccccgcgagcctctgaggtgccgtcccggctagcccaaatgatttcgatgggcccggtctacgatctggatcaggccatgctgcagatcggtcattcgatcgactacatcgtctttgttcgtaagcgtgacctgcctgatgggagccggctgcgatttgttgagcagatccgttcagtctcgcctggtgattcgacaactcccagtcttggcgaggtgtacacggctgactcgtggacaggccagccgcttacgccactcatgcctggttcggccgccgacgagctgtctcacttcgcccgagacctggattactgcgaggcccactcatgaacactcccgcactaaccagcgccctcatcgtgaccgggctagggctgatcctggccatcgacgggctggtcccggcgccgcctcgacctggtgccccgctgagcccggcccaaaggtgggctcggctcacccaccgtcccactggtgcggccgggcgtcgccgggatttgcgttgggggttggctgttcttgtcggtgtcgtgctgtttgtgctcaccgggtgggtggctgcgctggcgctgggccccatcattgtgttgttggcccccaccctgctgggggcggccccaccgaccgatattccgctgatggaggcgctggatcgctgggtgcgtcaggtcgctgcggtgctgccacaggggcgcgacatcatcacagcggtgcggatctcacggccgcgggccccgaagctgatcgccgggtcggtggatcaactggtgtcccggttggatggccgtatggagccgagggaggcgttccagcggatggccgacgagctggactcggctgaggctgacgcggtgctggcctcactagcgttggcggccactcatccgcggggagcctcgacaacgttgaaggctattgctggcaacatccaacagcggttgaaagtgctgcggcaggtggaggctgaacggtctaagccgcgtaactcggtgcgccagatcacactggtcacgatcgccatgttcggggggctgctcgtgatcggacggtcgtttctggccccgctggcgacccctcccggtcaggtgctggtggccgtggcggtggtcatgtatgtcatcgcactagtgcagatgtatcggatggcgcggccccgtcgacgcacccggatcatggtcaggaggacccgatgaccattactgctttgtccctgctagccggggccatcgtcactgtcggactgctggtcatcgtggcagcgttccgcccagccccaggccctgacctggttgccgctctggaggtggtgtcgggtcgcacctcaagcgtcgccgagaacgtcgaccagacccggatcgggcggataggtcgcagcgtgacccgcacattccatgtgtcggtgtccccggccatgcgggccgcactgcgactccaaggcacgacccccgaagcgttctacggtcgacgcctgatctgcgcactgatcggggcgatcctgccgtggctgctcaacgcggtagccatcgcggtaggggcgaattccccgaacctactcatcccttcggcgctgtgtgtggcgttagctggcgctggatggatgctgccggcagcacggttgaaggctgcggccgggcccaccaacgatgactcgttcgaagcgctgctggtattcatcgatttggtcgtgctggaacggctcgccaacgaaacctccgtcgacgcgctcaccaatgcggcaaacatgtcggactcgccgctattcgtccagatccgtcaagtcctcaaccgtgcctccctggaaaacgtcgacccgtggaacgggctagaccggctagccgaggacatcaaactgcccgaactcaccgatgtggtctccatcgcccgcctccaaaacgaaggcgcctccctcgtcgacagtttccgggcccgagtcgccgagttacgcgacgcctacctgctgcgcctgcaacaagaatccaccgccatcacccagcggcttggtttgtggacgatcctgcaagccggctcggtcatgctcatcttgctgggggcggccgccctcacactcatcacagccggataaaacgacaccgtgtcgagcccccatatgggccgcgaacctttcataatgatgcctgtaagcaccacaatattgatcacaacctaacaatgaaggagaaatcatgatgaccgatctcgacctggctaaaaaacagatcacctggctggcggcgcacctgcgttcccggatcgttgacgagcgtggcggtggtagctctaccgtggagacactgatttggattggtgtcatcgtggcgctggtgattggtgtgggcgtcggggtgacggcctatatcaggtcgaagatgcctcactgacgacgatgcgtagcaggttcacaactgatcagcgtggcggtggtagcgcgtcggtggggatgctcctgctgatgcctgcgatcatgctgctggcattcggtgggatcgaggtcgggatgtggtgtcacgcccatcagtcgaccatcgcggcagcccaaagcgccgcggaggctcagcgtgtcgtccatccggtcccggggtcggcacaggaggcagcctcgcagatcactagtcatggcggggtgcgtgatgcgcggatatcggtcagtgatgacggggccactgtcacggtgaccgtctcaggtcgggccccatcgatgctggggctgcatcttccggctgtgtcgtcgacagcgtcgatgcccaaggagcgcctgtcgtgaggcgaagtgagcgcggtggagcaagtctaagcgtcgaggtgctcatgtgggcgccgatcgcgctggtgatcatcgggtttgttgtgggtatcggccggatgtcgatggcccaggacgcggtgagtggcgcggcgggtgctgcggcccgtgcggcgtcgttggagcgtgatggacagtcggctcagtctgcggcgcagcaggcggcgtcggcgaacctgtcgtccggtgggctggcatgtgcgccgagtgtgagcgtggacacgtcagtgtttgcccgtcctgccgggcaggcgggcacggttcacgccacggtcacgtgtgtcacctcgctgggtcttgggttcgggtcccggacggtgcacgcaacggggtctgccccggtagacacctatcgggaaaggagaggctgagatggcccgcgatgagcgtggtggcggctcggtgtcggtgtggatgctgctcatggtgccggtgattctggtcatggccggcctggtttttgacgggtcccgtcagatatcggcaacccaggcggcccaggacgcggcggttgcggcatcccgcgccggaactgatgcggcagcgacaccgcagcttgctggccacgacggggcggccgtagcagtccaagcggcccgccaggcactatctgctgccggggtggacgggtcggtgcaggaggacgggtcgaccatcacggtgaccacgtctcaaagtcggccgacagtgttcctgtcagcgatcggaatcagccaggtaagggggcatgggcaggcccatgctcagcttgtgggaccgggagaacgcccatgacagtgatacgtcgtatcggtgccctggtggcactgctggtggtgatagccggcttaccggccgggctcgtggccgcaggcgccccgctagtaccctcgggcctgtcatgggcccatgtgcggcatctgttggttaccccagacatgaccgggtcggtgctggtgtggctggtcagcctcatcggctggatcgggtgggcatggttcgccctggccgtcgcagccgaagcggtgacgatgctctcagggcagcggctgcactggcacatgcccggccctcgcctagtgcgccgagtggcagccggtcttctcattgccgcgttcgcggccgcaccggcagccacaagcacggctcacgccgccgaggccacccatgtggcggtcgccgcccaggctggaccggcacacgcggcccccgcccaggacagccccgccaccacctctcaggccccggacgcctccaccactccgaaaatctggaagacctacacggtgcgggccaacgactacctgtggaagatcgccgagcactactacggt

SEQ ID NO: 250 - DNA, 4617 bp, Propionibacterium acnes
  source 1..4617: mol_type = genomic DNA
gcgataccgcaaggctgtgtgggatcagctgtgccgctcccccgacatggcagacagcaccgttgcatgagaactgactgacactgtggcgccgcggaggtctcccgcggcgtccgctggggcgagtgcatgcctgtcagctcatcttttatcgtcatgtttccccttgtcagagcggtctttgcaaagtgacaacgtcaggggtcttgacgacaacatcctcgacaacatcgtggcggtggtctgtgtctcgtcagttcaacgcaccggggaaagaggcaccgctgatgttcaccaccacaaacaccctcaacgatgaatgggaccagattcgcgccactgagatcgattggcatgactgccctgaactgatgcactgcatcgacgttgatgatgtgttggccgtcattcctgccgcccccgacgccatcttgggctacctcattgcccgggctcagggcggtgacgagttggccacccgcactatcatccaagcgttcacaggcaagcttattttgatggccacggccaccaaggtgcgccgtactaatgacggcttcaatgatctgttggcgggtctgtgggagacgatcatcacgtacccgttagatcgtcgccctgacaagatcgctgcgaacctcatcctcgacacgttgcaccgggttacccggttttggcgtgctgattcccccgatgaggaagaggctcacggtctggtgcccttccctgacactctcatcgccccagagcccgatgaggacgtcacagctagccaggccatcgccttggcggtggaccgcaactggattaccgaggacctagcccgcctcatgagccatatttactgtgacggtatgactggagctgatgcgggtcgtctgcatggctgcgctccagctacggtgcgatctcgatgccgtgatggtcgggccgtgttgcagcgcaacgccgagacgatcctggccgtctgctgatccctctcttgctcatgcctgccgccaccctacccctacctgctagaaacatagccatgtctccagcaacgcatctagcgtatcttctagcaattgatctagctatcatatagctgatgatctagctatcatatagctgtgtctccagcccaaaggacagcccaatggcatgcttgccacaggaaggtgcgtcagcctcccgaaatactggaaggagctttaccgtgcaggacatgacctcgaccagaccgattgaccgatccccgttcgaccgcactattgcggtgtggaaccacaaaggcggcacgttcaagacgtccgtcgtggcgaacctgggatacctgttcgccgccggtggcaacaaggtgttgatggtcgacatggacccccaggccaatctcgacattgacttcggtatacccgcgggagaacgtgaacggggcatgggattagccgaggcgctacgtgaggggacggcccttcccccaccgcagcatctcagcgaaaaccttcacctggtcagtggcggcccggccctccacgagttcaccgaccccgcatccttagcggccatcctcgaccgagtcaccaccgcacgctacgacctgctagctcaggcccttgccccgctggcctgggactatgacctcatcttcatcgactccgggccggcccaaactctgctgtcccagaccatccttggagtagcccgctggctggtagtgcccacccgcaccgataacgcctcaatcactggcctcgtcgacgttcaagacgccatcgacggggttgcctcctgcaaccctgaccttcaactactcggcgttgtcctagccggcgtgggggcccgggccacccggatcgccgcagataaacgccacgccatcgacacagtgctgggggcaggaaccgttttcgatgcggtcatccactactccgagaaggtgtccgtgctcgcacgccagcagggcaagaccgtcgccgagctagccaacgactaccacaacacccagcccgcctacacctacctagctaaaggccagaacatccccaacgtcgccaaggcagccgtcagcatcgaaactgattatctgaggctggccaccgagatcagcgaccgcatgttcaccagcgacgagcaggagcctgatcatgactgacgatccgactccatccgagcagaacaaccccaccagcgacgacatgcgcttggccgaagaatgggccaacagcggccgcacagtgggagccctgccgcgccgtcaacggcctcagcgacccacaccccgcaccaccagccaaccccctgtctcgtcccctgacacaccggctccgaaaaaaccccagaagacccccaccagccagcctggccgtcaacggatcaacgtcaccgtctacgttgtgcccgaactccatgagcggctgcgctcccgatcggcggcgacgggggtgacggtctcggatctggtggtgcatgcgttagcgttcgtcgccgatcatgcgggggaggcgatcgccgatgatctgcgcgtcgagacgggccccggcatgggggccggactgttcgatgtgaccccatcgcggccagtaggggtcgccaaaacccagctgggggtgcgaatgacccgccacaacaaggatggtttggaccagctgacccggacgagtggagcccgtgaccgcagccatcttgtgtctgtcgccgtgcgcgactatctcgactccaaccctgtaaagaaaggccgacatgtccgctgatgaaactcctgccgcccggggtgggcgacgctttgatacgaccgtcaagcccaggcgccgtcccatgcttatcgccgccggtatcgccatcgtgatagtcggcgcgctcctcatcactcagttgattcgctccgcccaaaccgagcatcgcgtgctggaagtccacgccgatgtggctcgcggcgaggtcatccgtgacaccgatctggtatcggtgactgtcggccaggtcgacaacgtatcaacggttcccgcagaccagctcgactcactggtcggcaaacgcgccacggcagatcttcgagccggatcactcttacctgctggggctatcggcccggccgatgtcgttccagctccgggcaagtcgctggtcgggctgaagctagccgccggacagatccctatcggagaccttgctgccgggacgaagctgcgcctgatccagacgtcggcacccagcggctcatccaccaccactgatagcagcaccaataccgatggccagtcgtgggaggcaacaatggcgaccggcaccaaaaagaccgagcaggtcaccttgatcaacgccgaagtgaactcgcgtgatgccgcccggatcgcccaactgacgtcacagggccgtatcgccgtagtgaaggatccgatccgatgagcaccattgttttgaccagcgtctcgggagccccaggggtcaccacgacagcgatcgggctgggcagggtctggccacaatcgagcctggtcgtcgaggatgacacccaccacgccatgctggcgggctacctgcgagcctcccagcacgccgaaccgaacctggccgcagtggcgaacctgacgtcgactccaaccaacgcccaaacggtgtgggaatctatcgccagacccctacccaccgatgacccagtcggcgggctgcgacgcaaaggcatcctcggcccgcccacgccgtggtctcgcgcaggcatcgacccccgatggggattcatgctggccctgtggcggcaactggaggaggctggcatcgacaccatcatcgatttgggtcgcctagccacaccactgacctcaacgccacacctgatcgccgcacccatcgtcgaggacgccgacatgatcttggtgatgatcgaggcgacactacgcgacatcgccggcgcccgcacgatggtggagggactcgctgagcagatgaacttggccggcgcctaccgacgtctcggactgcttgtccaccgtggcggccaggcccgcggcgtcgccgagttcaatgacaaggagatcacctcggcgttacgactcccggtcatcggggccattacccatgacccggccggagccgcccaactctccgacggggtcgggcagcggttcgacaagtcacgtctggcccactcactatcaaaggtggcggccagcctcgtcgatgccataaacaagcgccacgctgatgacgaggaggatctgtgatggccagttttgctgataatccgttcgacaagctgcgctcccaggatgcggcaagagcttcggtagagcaggagcctgatgccggattagcgtcggagttgttttcgacgtcgtcggggtgggccagctctcagcaggtgtcccaagctcaaccggtgatgacccgttcggagaacgtggattggtcggttgtcgcggagctagccagtacggccactgatgaggttgaggctgagatcagccggtggagttccactcatgatggggtggcgacgctagacattcgccaggccatcgcggagcctgctattgcctcggcggtgtctacgtatgctgaccgacgccagatcgatgtaggggagacctggcctgatctggtacgccagcgataccgcaaggctgtgtgggatcagct

SEQ ID NO: 251 - DNA, 4613 bp, Propionibacterium acnes
  source 1..4613: mol_type = genomic DNA
gataccgcaaggctgtgtgggatcagctgtgccgctcccccgacatggcagacagcaccgttgcatgagaactgactgacactgtggcgccgcggaggtctcccgcggcgtccgctggggcgagtgcatgcctgtcagctcatcttttatcgtcatgtttccccttgtcagagcggtctttgcaaagtgacaacgtcaggggtcttgacgacaacatcctcgacaacatcgtggcggtggtctgtgtctcgtcagttcaacgcaccggggaaagaggcaccgctgatgttcaccaccacaaacaccctcaacgatgaatgggaccagattcgcgccactgagatcgattggcatgactgccctgaactgatgcactgcatcgacgttgatgatgtgttggccgtcattcctgccgcccccgacgccatcttgggctacctcattgcccgggctcagggcggtgacgagttggccacccgcactatcatccaagcgttcacaggcaagcttattttgatggccacggccaccaaggtgcgccgtactaatgacggcttcaatgatctgttggcgggtctgtgggagacgatcatcacgtacccgttagatcgtcgccctgacaagatcgctgcgaacctcatcctcgacacgttgcaccgggttacccggttttggcgtgctgattcccccgatgaggaagaggctcacggtctggtgcccttccctgacactctcatcgccccagagcccgatgaggacgtcacagctagccaggccatcgccttggcggtggaccgcaactggattaccgaggacctagcccgcctcatgagccatatttactgtgacggtatgactggagctgatgcgggtcgtctgcatggctgcgctccagctacggtgcgatctcgatgccgtgatggtcgggccgtgttgcagcgcaacgccgagacgatcctggccgtctgctgatccctctcttgctcatgcctgccgccaccctacccctacctgctagaaacatagccatgtctccagcaacgcatctagcatatcttctagcaattgatctagctatcatatagctgatgatctagctatcatatagctgtgtctccagcccaaaggacagcccaatggcatgcttgccacaggaaggtgcgtcagcctcccgaaatactggaaggagctttaccgtgcaggacatgacctcgaccagaccgattgaccgatccccgttcgaccgcactattgcggtgtggaaccacaaaggcggcacgttcaagacgtccgtcgtggcgaacctgggatacctgttcgccgccggtggcaacaaggtgttgatggtcgacatggacccccaggccaatctcgacattgacttcggtatacccgcgggagaacgtgaacggggcatgggattagccgaggcgctacgtgaggggacggcccttcccccaccgcagcatctcagcgaaaaccttcacctggtcagtggcggcccggccctccacgagttcaccgaccccgcatccttagcggccatcctcgaccgagtcaccaccgcacgctacgacctgctagctcaggcccttgccccgctggcctgggactatgacctcatcttcatcgactccgggccggcccaaactctgctgtcccagaccatccttggagtagcccgctggctggtagtgcccacccgcaccgataacgcctcaatcactggcctcgtcgacgttcaagacgccatcgacggggttgcctcctgcaaccctgaccttcaactactcggcgttgtcctagccggcgtgggggcccgggccacccggatcgccgcagataaacgccacgccatcgacacagtgctgggggcaggaaccgttttcgatgcggtcatccactactccgagaaggtgtccgtgctcgcacgccagcagggcaagaccgtcgccgagctagccaacgactaccacaacacccagcccgcctacacctacctagctaaaggccagaacatccccaacgtcgccaaggcagccgtcagcatcgaaactgattatctgaggctggccaccgagatcagcgaccgcatgttcaccagcgacgagcaggagcctgatcatgactgacgatccgactccatccgagcagaacaaccccaccagcgacgacatgcgcttggccgaagaatgggccaacagcggccgcacagtgggagccctgccgcgccgtcaacggcctcagcgacccacaccccgcaccaccagccaaccccctgtctcgtcccctgacacaccggctccgaaaaaaccccagaagacccccaccagccagcctggccgtcaacggatcaacgtcaccgtctacgttgtgcccgaactccatgagcggctgcgctcccgatcggcggcgacgggggtgacggtctcggatctggtggtgcatgcgttagcgttcgtcgccgatcatgcgggggaggcgatcgccgatgatctgcgcgtcgagacgggccccggcatgggggccggactgttcgatgtgaccccatcgcggccagtaggggtcgccaaaacccagctgggggtgcgaatgacccgccacaacaaggatggtttggaccagctgacccggacgagtggagcccgtgaccgcagccatcttgtgtctgtcgccgtgcgcgactatctcgactccaaccctgtaaagaaaggccgacatgtccgctgatgaaactcctgccgcccggggtgggcgacgctttgatacgaccgtcaagcccaggcgccgtcccatgcttatcgccgccggtatcgccatcgtgatagtcggcgcgctcctcatcactcagttgattcgctccgcccaaaccgagcatcgcgtgctggaagtccacgccgatgtggctcgcggcgaggtcatccgtgacaccgatctggtatcggtgactgtcggccaggtcgacaacgtatcaacggttcccgcagaccagctcgactcactggtcggcaaacgcgccacggcagatcttcgagccggatcactcttacctgctggggctatcggcccggccgatgtcgttccagctccgggcaagtcgctggtcgggctgaagctagccgccggacagatccctatcggagaccttgctgccgggacgaagctgcgcctgatccagacgtcggcacccagcggctcatccaccaccactgatagcagcaccaataccgatggccagtcgtgggaggcaacaatggcgaccggcaccaaaaagaccgagcaggtcaccttgatcaacgccgaagtgaactcgcgtgatgccgcccggatcgcccaactgacgtcacagggccgtatcgccgtagtgaaggatccgatccgatgagcaccattgttttgaccagcgtctcgggagccccaggggtcaccacgacagcgatcgggctgggcagggtctggccacaatcgagcctggtcgtcgaggatgacacccaccacgccatgctggcgggctacctgcgagcctcccagcacgccgaaccgaacctggccgcagtggcgaacctgacgtcgactccaaccaacgcccaaacggtgtgggaatctatcgccagacccctacccaccgatgacccagtcggcgggctgcgacgcaaaggcatcctcggcccgcccacgccgtggtctcgcgcaggcatcgacccccgatggggattcatgctggccctgtggcggcaactggaggaggctggcatcgacaccatcatcgatttgggtcgcctagccacaccactgacctcaacgccacacctgatcgccgcacccatcgtcgaggacgccgacatgatcttggtgatgatcgaggcgacactacgcgacatcgccggcgcccgcacgatggtggagggactcgctgagcagatgaacttggccggcgcctaccgacgtctcggactgcttgtccaccgtggcggccaggcccgcggcgtcgccgagttcaatgacaaggagatcacctcggcgttacgactcccggtcatcggggccattacccatgacccggccggagccgcccaactctccgacggggtcgggcagcggttcgacaagtcacgtctggcccactcactatcaaaggtggcggccagcctcgtcgatgccataaacaagcgccacgctgatgacgaggaggatctgtgatggccagttttgctgataatccgttcgacaagctgcgctcccaggatgcggcaagagcttcggtagagcaggagcctgatgccggattagcgtcggagttgttttcgacgtcgtcggggtgggccagctctcagcaggtgtcccaagctcaaccggtgatgacccgttcggagaacgtggattggccggttgtcgcggagctagccagtacggccactgatgaggttgaggctgagatcagccggtggagttccactcatgatggggtggcgacgctagacattcgccaggccatcgcggagcctgctattgcctcggcggtgtctacgtatgctgaccgacgccagatcgatgtaggggagacctggcctgatctggtacgccagcgataccgcaaggctgtgtgggatcag

SEQ ID NO: 252 - DNA, 5053 bp, Propionibacterium acnes
  source 1..5053: mol_type = genomic DNA
tggtgggcgctggaccaggtttgcggggcatgcgcgcatcggtgatcttggccgccaccaggtgttccagattgtccaagtgcccggagtcagaggtcagcagaagagtagtcacctcgaccgcggtggctgaggcgatctgagctgtgcggcggtcgtgatgggtggtgtcagtgctgacagctgtggtgggagcggatgccggggccgccgaacggaccagggcaacggggccgcatgcgactccgcacagcacgagggcaaggaagcctttggtggccatcgatccggtgtggggccagggacccacgttttcctgtgcctgttttttcttggccgaccaacggcgggacttagggttagcggatgcaccttctggggtgcatgctcgtctcaatcgcatcggtcacctccttcactggatgaagggaccaaggaggtgaccgatgtgcggtcgaacccgaaaaagttcaaacttttttctgggtctgcctcaagtacgacagaaggcctgcatcatcacggcgttgtggtagcagatcttgcgtcagcgcaaatgtatgggcctcgtaggagtagctcttaggtgggtcccggtggttgcggccagggcgagggtgtcgggtatgtgtagcgctagtcccgggttcgtggtgtgagggcttttgggtgctgacatgcactacccattgctagacgctgtgctgtggcatggctggacgtctagcagacgggttgacatcacctttaggctggcagcgcccgaggccgcaggccagaggaagcggacagcctaacgattgacgtccccctctcctttccccaacctcctggagtcgatgacccggagatagatcgatgtctatgcatctgtgcatcgatatacctatgtatctgtctgtggtttttagaggccactcccgtcgccccgggccgctcagcgataccgcaaggctgtgtgggatcagctgttccgctctcccgacatggcagacagcaccctgcggactgactgacactgtggcgccgcggaggtctcccgcggcgtccgctggggcgagtgcatgcctgtcagctcatcttttatcgtcatgtttccccttgtcagagcggtctttgcaaagtgacaacgtcaggggtcttgacgacaacatcctcgacaacatcgtggcggtggtctgtgtctcgtcagttcaacgcaccggggaaagaggcaccgctgatgttcaccaccacaaacaccctcaacgatgagtgggaccagattcgcgccactgagatcgattggcatgactgccctgaactgatgcactgcatcgacgttgatgatgtgttggccgtcattcctgccgcccccgacgccatcttgggctacctcattgcccgggctcagggcggtgacgagttggccacccgcactatcatccaagcgttcacaggcaagcttatcttgatggccacggccaccaaggtgcgccgtactaatgacggcttcaatgatctgttggcgggtctgtgggagacgatcatcacgtacccgttggatcgtcgccctgacaagatcgctgcgaacctcatcctcgacacgttgcaccgggttacccggttctggcgtgctgattcccccgatgaggaagaggctcacggtctggtgcccttccctgacactctcatcgccccagagcccgatgaggacgtcacagctagccaggccatcgccttggcggtggaccgcaactggattaccgaggacctagcccgcctcatgagccatatttactgtgacggtatgactggagctgatgcgggtcgtctgcatggctgcgctccagctacggtgcgatctcgatgccgtgatggtcgggccgtgttgcagcgcaacgccgagacgatcctggccgtctgctgatccctctcttgctcatgcctgccgccaccctacccctacctgctagaaacatagccatgtctccagcaacgcatctagcgtatcttctagcaattgatctagctatgtatatagctgatgatctagctaccatatagctgtgtctccagcccaaaggacagcccaatggcatgcttgccacaggaaggtgcgtcagcctcccgaaatactggaaggagctttaccgtgcaggacatgacctcgaccagaccgattgaccgatccccgttcgaccgcactattgcggtgtggaaccacaaaggcggcacgttcaagacgtccgtcgtggcgaacctgggatacctgttcgccgccggtggcaacaaggtgctgctggtcgacatggacccccaggccaatctcgacattgacttcggtatacccgcgggagaacgtgaacggggcatgggattagccgaggcgctacgtgaggggacggcccttcccccaccgcagcatctcagcgaaaaccttcacctggtcagtggcggcgctgctctcaacgagttcaccgaccccgcatccttagcggccatcctcgaccgagtcaccaccgcacgctacgacctgctagctcaggcccttgccccgctggcctgggactatgacctcatcttcatcgactccgggccggcacaaactctgctgtcccagaccatccttggagtagcccgctggctggtagtgcccacccgcaccgataacgcctcaatcactggcctcgtcgacgttcaagacgccatcgacggggttgcctcctgcaaccctgaccttcaactactcggcgttgtcctagccggcgtgggggcccgggccacccggatcgccgcagataaacgccacgccatcgacacagtgctgggggcaggaaccgttttcgatgcggtcatccactactccgagaaggtgtccgtgctcgcacgccagcagggcaagaccgtcgccgagctagccaacgagtaccacaacacccagcccgcctacacctacctagctaaaggccagaacatccccaacgtcgccaaggcagccgtcagcatcgaaactgattatctgaggctggccaccgagatcagcgaccgcatgttcaccagcgacgagcaggagcctgatcatgactgacgatccgactccatccgagcagaacaaccccaccagcgacgacatgcgcttggccgaagaatgggccaacagcggccgcacagtgggagccctgccgcgccgtcaacggcctcagcgacccacaccccgcaccaccagccaaccccctgtctcgtcccctgacacaccggctccgaaaaaaccccagaagacccccaccagccagcctggccgtcaacggatcaacgtcaccgtctacgttgtgcccgaactccatgagcggctgcgctcccgatcggcggcgacgggggtgacggtctcggatctggtggtgcatgcgttagcgttcgtcgccgatcatgcgggggaggcgatcgccgatgatctgcgcgtcgagacgggccccggcatgggggccggactgttcgatgtgaccccatcgcggccagtaggggtcgccaaaacccagctgggggtgcgaatgacccgccacaacaaggatggtttggaccagctgacccggacgagtggagcccgtgaccgcagccatcttgtgtctgtcgccgtgcgcgactatctcgactccaaccctgtaaagaaaggccgacatgtccgctgatgaaactcctgccgcccggggtgggcgacgctttgatacgaccgtcaagcccaggcgccgtcccatgcttatcgccgccggtatcgccatcgtgatagtcggcgcgctcctcatcactcagttgattcgctccgcccaaaccgagcatcgcgtgctggaagtccacgccgatgtggctcgcggcgaggtcatccgtgacaccgatctggtatcggtgactgtcggccaggtcgacaacgtatcaacggttcccgcagaccagctcgactcactggtcggcaaacgcgccacggcagatcttcgagccggatcactcttgcctgctggggctatcggcccggccgatgtcgttccagctccgggcaagtcgctggtcgggctgaagctagccgccggacagatccctatcggagaccttgctgccgggacgaagctgcgcctgatccagacctcggcaggcgggtcatccaccaccgggcagggcgccaccaataccgatattcaatcgtgggctgcgacgatggcgtccggcaccaaaagtactgagcaggtcaccttgatcaatgtggaggtggactcgcgtgatgcagctcggatcgcccagctgacatcgcagggccgtatcgctgtggtaaaggattcgactcgatgagcacaatcgttttgaccagtgtgtcgggagccccgggggtgaccacgacagcgattgggttggggcgggtctggccacagtccagtctggttgtcgaggacgacacccatcacgcgatgttggcgggctatctgcgagctgcccagcacgccgagccgaacttggccacggtggcaaatctgacggccactccgaccaatgcccaaaccgtgtgggaatccatcgccaggcctctgcccaccgatgatccggtcagcgggctgagacgcaaggccgtcctcggcccgcccacaccgtggtctcgtgcaggtatcgacccccggtggggattcatgctggccctgtggcggcagctggccgaggccgggatcgacaccatcatcgacctgggtcgcctagccacgccgctgacgtcaacgccacatctgatcgccacacccatcgtcgaggacgccgacatgatcctggtgatgatcgaggcgacgctacgcgatgtggccggcgcccacacgatggtcgaagggctggccgagcagatgaacctggccggggcccaccagcgcctcggactgttggtccaccgcggcggcgcggcccgcggggtcgctgagttcaccgacaaagagatcacgtcggcgttgcagctaccggtctgcgggtcgatagtccatgacccagtcgcggcagcccagctgtctgacggggtcgggcagcggttcgacaagtcgcgtct

SEQ ID NO: 253 - DNA, 4892 bp, Propionibacterium acnes
  source 1..4892: mol_type = genomic DNA
gataccgcaaggctgtgtgggatcagctgttcgggatggggcggttgcagccgctgttcgaaatcagcgacgccgaaaacatcatcgtggtgggtaaccatgaggtggttgtcgaccacaacgatggttcccggtcaacgctgccgccggtggccgactcggatgccgagctggaatcccagatcgcccggatggcgaggaatgcgaccccgcggcgagccttcgacaccgatcacaccgatgtgacgatcatgcaccaacagaagttccgtatccacgcgatctcagcggaagtgtcattgcaaccgtcggtggtcatccgccaacatttgctcacccaaatcagtctgggggacctgtcacatcgcggaatgatgccggtggaagtggcccggttcctcgatgaggcggtacaagctggcaagtccatcgtggtcgccggcgagcagggggcaggcaagacgacgtttttacgagcgttgatccacgccattccgatgcgggagcggttcgccacgttggagaccgatcaggagttgttcgctcatctgatgcctggccgggaaaacacgctggtgctgttcgcccgtgatggtaacggcgaggtggatccggcgactggcacccagcacggcgctatcgagatcgcccagctgattcctcctagcctgcgccaggcgttaactagggtcattgtcggtgaggtgcgcggcaatgaggcctcggccatgttccaggccatgcagtcgggtacaggcaccatgagcagtatccactccccgcgagcctctgaggtgccgtcccggctagcccaaatgatttcgatgggcccggtctacgatctggatcaggccatgctgcagatcggtcattcgatcgactacatcgtctttgttcgtaagcgtgacctgcctgatgggagccggctgcgatttgttgagcagatccgttcagtctcgcctggtgattcgacaactcccagtcttggcgaggtgtacacggctgactcgtggacaggccagccgcttacgccactcatgcctggttcggccgccgacgagctgtctcacttcgcccgagacctggattactgcgaggcccactcatgaacactcccgcactaaccagcgccctcatcgtgaccgggctagggctgatcctggccatcgacgggctggtcccggcgccgcctcgacctggtgccccgctgagcccggcccaaaggtgggctcggctcacccaccgtcccactggtgcggccgggcgtcgccgggatttgcgttgggggttggctgttcttgtcggtgtcgtgctgtttgtgctcaccgggtgggtggctgcgctggcgctgggccccatcattgtgttgttggcccccaccctgctgggggcggccccaccgaccgatattccgctgatggaggcgctggatcggtgggtgcgtcaggtcgctgcggtactgccacaggggcgagacatcatcacagcggtgcggatctcacggccgcgggccccgaagctgatcgccgggtcggtggatcaactggtgtcccggttggatggccgtatggagccgagggaggcgttccagcggatggccgacgagctggactcggctgaggctgacgcggtgctggcctcactagcgttggcggccactcatccgcggggagcctcgacaacgttgaaggctattgctggcaacatccaacagcggttgaaagtgctgcggcaggtggaggctgaacggtctaagccgcgtaactcggtgcgccagatcacactggtcacgatcgccatgttcggggggctgctcgtgatcggacggtcgtttctggccccgctggcgacccctcccggtcaggtgctggtggccgtggcggtggtcatgtatgtcatcgcactagtgcagatgtatcggatggcgcggccccgtcgacgcacccggatcatggtcaggaggacccgatgaccattactgctttgtccctgctagccggggccatcgtcactgtcggactgctggtcatcgtggcagcgttccgcccagccccaggccctgacctggttgccgctctggaggtggtgtcgggtcgcacctcaagcgtcgccgagaacgtcgaccagacccggatcgggcggataggtcgcagcgtgacccgcacattccatgtgtcggtgtccccggccatgcgggccgcactgcgactccaaggcacgacccccgaagcgttctacggtcgacgcctgatctgcgcactgatcggggcgatcctgccgtggctgctcaacgcggtagccatcgcggtaggggcgaattccccgaacctactcatcccttcggcgctgtgtgtggcgttagctggcgctggatggatgctgccggcagcacggttgaaggctgcggccgggcccaccaacgatgactcgttcgaagcgctgctggtattcatcgatttggtcgtgctggaacggctcgccaacgaaacctccgtcgacgcgctcaccaatgcggcaaacatgtcggactcgccgctattcgtccagatccgtcaagtcctcaaccgtgcctccctggaaaacgtcgacccgtggaacgggctagaccggctagccgaggacatcaaactgcccgaactcaccgatgtggtctccatcgcccgcctccaaaacgaaggcgcctccctcgtcgacagtttccgggcccgagtcgccgagttacgcgacgcctacctgctgcgcctgcaacaagaatccaccgccatcacccagcggcttggtttgtggacgatcctgcaagccggctcggtcatgctcatcttgctgggggcggccgccctcacactcatcacagccggataaaccgacaccgtgtcgagcccccatatgggccgcgaacctttcataatgatgcctgtaagcaccacaatattgatcacaacctaacaatgaaggagaaatcatgatgaccgatctcgacctggctaaaaaacagatcacctggctggcggcgcacctgcgttcccggatcgttgacgagcgtggcggtggtagctctaccgtggagacactgatttggattggtgtcatcgtggcgctggtgattggtgtgggcgtcggggtgacggcctatatcaggtcgaagatgcctcactgacgacgatgcgtagcaggttcacaactgatcagcgtggcggtggtagcgcgtcggtggggatgctcctgctgatgcctgcgatcatgctgctggcattcggtgggatcgaggtcgggatgtggtgtcacgcccatcagtcgaccatcgcggcagcccaaagcgccgcggaagctcagcgtgtcgtccatccggtcccggggtcggcacaggaggcagcctcgcagatcactagtcatggcggggtgcgtgatacccggatatcggtcagtgatgacggggccactgtcacggtgaccgtctcaggtcgggccccatcgatgctggggctgcatcttccggctgtgtcgtcgacagcgtcgatgcccaaggagcgcctgtcgtgaggcgaagtgagcgcggcggagcaagtctaagcgtcgaggtgctcatgtgggcgccgatcgcgctggtgatcatcgggtttgttgtgggtatcggccggatgtcgatggcccaggacgcggtgagtggcgcggctggtgctgcggcccgtgcggcgtcgttggagcgtgatggacagtcggctcagtctgcggcgcagcaggcggcgtcggcgaacctgtcgtccggtgggctggcatgtgcgccgagtgtgagcgtggacacgtcagtgtttgcccgtcctgccgggcaggcgggcacggttcacgccacggtcacgtgtgtcacctcgctgggtcttggattcgggtcccggacggtgcacgcaacggggtctgccccggtagacacctatcgggaaaggagaggctgagatggcccgcgatgagcgtggtggcggctcggtgtcggtgtggatgctgctcatggtgccggtgattctggtcatggccggcctggtttttgacgggtcccgtcagatatcggcaacccaggcggcccaggacgcggcggttgcggcatcccgcgccggaactgatgcggcagcgacaccgcagcttgctggccacgacggggcggccgtagcagtccaagcggcccgccaggcactatctgctgccggggtggacgggtcggtgcaggaggacgggtcgaccatcacggtgaccacgtctcaaagtcggccgacagtgttcctgtcagcgatcggaatcagccaggtaagggggcatgggcaggcccatgctcagcttgtgggaccgggagaacgcccatgacagtgatacgtcgtatcggtgccctggtggcactgctggtggtgatagccggcttaccggccgggctcgtggccgcaggcgccccgctagtaccctcgggcctgtcatgggcccatgtgcggcatctgttggttaccccagacatgaccgggtcggtgctggtgtggctggtcagcctcatcggctggatcgggtgggcatggttcgccctggccgtcgcagccgaagcggtgacgatgctctcagggcagcggctgcactggcacatgcccggcccccgcttggcgcgccgagtggcagccggtctcctcattgccgcgttcgcgggcgcaccggcggccacgtcggcagctcacgcggtcgaggccacccatgtggcggtcgcagctcaggcttccccggcccacgcggccggcacccaggacagccccgccaccacctctcaggccccggacgcctccaccactccgaaaatctggaagacctacacggtgcgggccaacgactacctgtggaagatcgccgagcactactacggt

SEQ ID NO: 254 - DNA, 4611 bp, Propionibacterium acnes
  source 1..4611: mol_type = genomic DNA
gcgataccgcaaggctgtgtgggatcagctgtgccgctcccccggcatgacaggcggcgccccacagattgacgacactgcggggctgcggaggtctcccgcggcgtccgctggggcgagtgcatgcctgtcagctcatcttttatcgtcatgtttccccttgtcagagcggtttttgcaaagtgacaacgtcaggggtcttgacgacaacatcctcgacaacatcgtggcggtggtctgtgtcttgtcagttcaacgcaccggggaaagaggcaccgctgatgttcaccaccacagctaccctcaacgatgaatgggaccagattcgcgccatcgagatcgattggcatgactgccccgaactgatgcactgcatcgacgttgatgatgtgttggccgtcattcctgccgcccccgacgccatcttgggctacctcattgcccgggctcagggcggtgacgagttggccacccgcactatcatccaagcgttcacaggcaagcttattttgatggccacggccaccaaggtgcgccgtactaatgacggcttcaatgatctgttggcggggttgtgggagacgatcatcacgtacccgttggatcgtcgccctgacaagatcgctgcgaacctcaccctcgacacgttgcaccgggttacccggttctggcgtgctgattcccccgatgaggaagaggctcacggtctggtgcccttccctgacactctcatcgccccagagcccgatgaggacgtcacagctagccaggccatcgccttggcggtggaccgcaactggattaccgaggacctagcccgcctcatgagccatatttactgtgacggtatgactggagctgatgcgggtcgtctgcatggctgcgctccagctacggtgcgatctcgatgccgtgatggtcgggccgtgttgcagcgcaacgccgagacgatcctggccgtctgctgatcctctcttgctcatgcctgccgccaccctacccctacctgctagaaacatagccatgtctccagcaacgcatctagcatatcttctagcaattgatctagctatgtatatagctgatgatctagctatcatatagctgtgtctccagcgcaaatgacagcccaatagcatgcttgccacaggaaggtgcgtcagcctcccgaaatactggaaggagctttaccgtgcaggacatgacctcgaccagaccgattgaccgatccccgttcgaccgcactattgcggtgtggaaccacaagggcggcacgttcaagacgtccgtcgtggcgaacctgggatacctgttcgccgccggtggcaacaaggtgctgctggtcgacatggacccccaagccaatctcgacattgacttcggtatacccgcgggagaacgtgaacggggcatgggattagccgaggcgctacgtgaggggacggcccttcccccaccgcagcatctcagcgagaaccttcacctggtcagtggcggcgctgctctcaacgagttcaccgaccccgcatccttagcggccatcctcgagcgggtcaccaccgagcgctacgacctgctagctcaggcccttgccccgctggcctgggactatgacctcatcttcatcgactccgggcctgcccaaactctgctgtcccagaccatccttggagtagcccgctggctggtagtgcccacccgcaccgataacgcctcaatcactggcctcgtcgacgttcaagacgccatcgacggggttgcctcctgtaaccctgaccttcaactactcggcgttgtcctagccggcgtgggggcccgggccacccggatcgccgcagataaacgccacgccatcgacacagtgctgggggcaggaaccgttttcgatgcggtcatccactactccgagaaggtgtccgtgctcgcacgccagcagggcaagaccgtcgccgagctagccaacgagtaccacaacacccagcccgcctacacctacctagctaaaggccagaacatccccaacgtcgccaaggcagccgtcagcatcgaaactgattatctgaggctggccaccgagatcagcgaccgcatgttcaccagcgacgagcaggagcctgatcatgactgacgatccgactccatccgagcagaacaaccccaccagcgacgacatgcgcttggccgaagaatgggccaacagcggccgcacagtgggagccctgccgcgccgtcaacggcctcagcgacccacaccccgcaccaccagccaaccccctgtctcgtcccctgacacaccggctccgaaaaaagcccagaagacccccaccagccagcctggccgtcaacggatcaacgtcaccgtctacgttgtgcccgaactccatgagcggctgcgctcccgatcggcggcgacgggagtgacggtctcggatctggtggtgcatgcgttagcgttcgtcgccgatcatgcgggggaggcgatcgccgatgatctgcgcgtcgagacgggccccggcatgggggccggactgttcgatgtgaccccatcgcggccagtaggggtcgccaaaacccagctgggggtgcgaatgacccgccacaacaaggatggtttggaccagctgacccggacgagtggagcccgtgaccgcagccatcttgtgtctgtcgccgtgcgcgactatctcgactccaaccctgtaaagaaaggccgacatgtccgctgatgaaactcctgccgcccggggtgggcgacgctttgatacgaccgtcaagcccaggcgccgtcccatgcttatcgccgccggtatcgccatcgtgatagtcggcgcgctcctcatcactcagttgattcgctccgcccaaaccgagcatcgcgtgctggaagtccacgccgatgtggctcgcggcgaggtcatccgtgacaccgatctggtatcggtgactgtcggccaggtcgacaacgtatcaacggttcccgcagaccagctcgactcactggtcggcaaacgcgccacggcagatcttcgagccggatcactcttgcctgctggggctatcggcccggccgatgtcgttccagctccgggcaagtcgctggtcgggctgaagctagccgccggacagatccctatcggagaccttgctgccgggacgaagctgcgcctgatccagacgtcggcacccagcggctcatccaccaccactgatagcagcaccaataccgatggccagtcgtgggaggcaacaatggcgaccggcaccaaaaagaccgagcaggtcaccttgatcaacgccgaagtgaactcgcgtgatgccgcccggatcgcccaactgacgtcacagggccgtatcgccgtagtgaaggatccgatccgatgagcaccattgttttgaccagcgtctcgggagccccaggggtcaccacgacagcgatcgggctgggcagggtctggccacaatcgagcctggtcgtcgaggatgacacccaccacgccatgctggcgggctacctgcgagcctcccagcacgccgaaccgaacctggccgcagtggcgaacctgacgtcgactccaaccaacgcccaaacggtgtgggaatctatcgccagacccctacccaccgatgacccagtcggcgggctgcgacgcaaaggcatcctcggcccgcccacgccgtggtctcgcgcaggcatcgacccccgatggggattcatgctggccctgtggcggcaactggaggaggctggcatcgacaccatcatcgatttgggtcgcctagccacaccactgacctcaacgccacacctgatcgccgcacccatcgtcgaggacgccgacatgatcttggtgatgatcgaggcgacactacgcgacatcgccggcgcccgcacgatggtggagggactcgctgagcagatgaacttggccggcgcccaccgacgtctcggactgcttgtccaccgtggcggccaggcccgcggcgtcgccgagttcaatgacaaggagatcacctcggcgttacgactcccggtcatcggggccattacccatgacccggccggagccgcccaactctccgacggggtcgggcagcggttcgacaagtcacgtctggcccactcactatcaaaggtggcggccagcctcgtcgatgccataaacaagcgccacgctgatgacgaggaggatctgtgacggccagttttgctgataatccgttcgacaagctgcgctcccaggatgcggcaagagcttcggtagagcaggagcctgatgccggattagcgtcggagttgttttcggcgtcgtcggggtgggccagctctcagcaggtgtcccaagctcaaccggtgatgacccgttcggagaacgtggattggccggttgtcgcggagctagccagtacggccactgatgaggttgaggctgagatcagccggtggagttccactcatgatggggtggcgacgctagacattcgccaggccatcgcggagcctgctattgcctcggcggtgtctacgtatgctgaccgacgccagatcgatgtaggggagacctggcctgatctggtacgccagcgataccgcaaggctgtgtgggatcagct

SEQ ID NO: 255 - DNA, 4345 bp, Propionibacterium acnes
  source 1..4345: mol_type = genomic DNA
ccggacagatccctatcggagaccttgctgtcgggacgaagctgcgcctgatccagacgtcggcacccagcggctcatccaccaccactgatagcagcaccaataccgatggccagtcgtgggaggcaacaatggcgaccggcaccaaaaagaccgagcaggtcaccttgatcaacgccgaagtgaactcgcgtgatgccgcccggatcgcccaactgacgtcacagggccgtatcgccgtagtgaaggatccgatccgatgagcaccattgttttgaccagcgtctcgggagccccaggggtcaccacgacagcgatcgggctgggcagggtctggccacaatcgagcctggtcgtcgaggatgacacccaccacgccatgctggcgggctacctgcgagcctcccagcacgccgaaccgaacctggccgcagtggcgaacctgacgtcgactccaaccaacgcccaaacggtgtgggaatctatcgccagacccctacccaccgatgacccagtcggcgggctgcgacgcaaaggcatcctcggcccgcccacgccgtggtctcgcgcaggcatcgacccccgatggggattcatgctggccctgtggcggcaactggaggaggctggcatcgacaccatcatcgatttgggtcgcctagccacaccactgacctcaacgccacacctgatcgccgcacccatcgtcgaggacgccgacatgatcttggtgatgatcgaggcgacactacgcgacatcgccggcgcccgcacgatggtggagggactcgctgagcagatgaacttggccggcgcctaccgacgtctcggactgcttgtccaccgtggcggccaggcccgcggcgtcgccgagttcaatgacaaggagatcacctcggcgttacgactcccggtcatcggggccattacccacgacccggccggagccgcccaactctccgacggggtcgggcagcggttcgacaagtcacgtctggcccactcactatcaaaggtggcggccagcctcgtcgatgccataaacaagcgccacgctgatgacgaggaggatctgtgatggccagttttgctgataatccgttcgacaagctgcgctcccaggatgcggcaagagcttcggtagagcaggagcctgatgccggattagcgtcggagttgttttcgacgtcgtcggggtgggccagctctcagcaggtgtcccaagctcaaccggtgatgacccgttcggagaacgtggattggccggttgtcgcggagctagccagtacggccactgatgaggttgaggctgagatcagcaggtggagttccactcatgatggggtggcgacgctagacattcgccaggccatcgcggagcctgctattgcctcggcggtgtctacgtatgctgaccgacgccagatcgatgtaggggagacctggcctgatctggtacgccagcgataccgcaaggctgtgtgggatcagctgttcgggatggggcggttgcagccgctgttcgaaatcagcgacgccgaaaacatcatcgtggtgggtaaccatgaggtggttgtcgaccacaacgatggttcccggtcaacgctgccgccggtggccgactcggatgccgagctggaatcccagatcgcccggatggcgaggaatgcgaccccgcggcgagccttcgacgccgatcacaccgatgtgacgatcatgcaccaacagaagttccgtatccacgcgatctcttcggaggtgtcgttgcaaccgtcggtggtcatccgccaacatttgctcacccaaatcagtctgggggacctgtcccagcggggaatgatgccggtggaagtggcccggttcctcgatgaggcggtacaagctggcaagtccatcgtggtcgccggcgagcagggggcaggcaagacgacgtttttacgagcgttgatccacgccattccgatgcgggagcggttcgccacgttggagaccgatcaggagttgttcgctcatctgatgcctggccgggaaaacacgctggtgctgttcgcccgtgatggtaacggcgaggtggatccggcgactggcacccagcacggcgctatcgagatcgcccagctgattcctcctagcctgcgccaggcgttaactagggtcattgtcggtgaggtgcgcggcaatgaggcttcggccatgttccaggctatgcagtcggggactggcactatgagcagtatccactccccgcgagcctctgaggtgccgtcccggctagcccaaatgatttcgatgggcccggtctacgatctggatcaggccatgctgcagatcggtcattcgatcgactacatcgtctttgttcgtaagcgtgacctgcctgatgggagccggctgcgatttgttgagcagatccgttcagtctcgcctggtgattcgacaactcccagtcttggcgaggtgtacacggctgactcgtggacaggccagccgcttacgccactcatgcctggttcggccgccgacgagctgtctcacttcgcccgagacctggattactgcgaggcccactgatgaacaccccagcgctgatagcagccctcatcgtgaccggcctgggactgatcatggccatcaacggcctgatcccggccacacccaaacccggcaccacgctgacgctgtcacagcggtgggcccgggccacccaccgcccagccggggcagccgggcgccgacgcgacctgcgctgggcgctggccggtctcgtcggcatcgtgctgttcgtcctcacaggttgggtcgctgccctggccctgggccccatcaccgtgctgctagcacccaccctgctgggggcggccccaccgaccgatattccgctgatggaggcgttggatcggtgggtgcgtcaggtcgctgcggtgctgccacaggggcgagacatcatcacagcggtgcggatctcacggccgcgggccccgaagctgatcgccgggtcggtggatcaactggtgtcccggttggatggccgtatggagccgagggaggcgttccagcggatggccgacgagctggactcggctgaggctgacgcggtgctggcctcactagcgttggcggccactcatccgcggggagcctcgacaacgttgaaggctattgctggcaacatccaacagcggttgaaagtgctgcggcaggtggaggctgagcggtctaagccgcgtaactcggtgcgccagatcacactggtcacgatcgccatgttcggggggctgctcgtgatcggacggtcgtttctggccccgctggcgacccctcccggtcaggtgctggtggccgtggcggtggtcatgtatgtcatcgcactagtgcagatgtatcggatggcgcggccccgtcgacgcacccggatcatggtcaggaggacccgatgaccattactgctttgtccctgctggccggggccatcgtcactgtcggactgctggtcatcgtggcagcgttccgcccagccccaggccctgacctggttgccgctctggaggtggtgtcgggtcgcacctcaagcgtcgccgagaacgtcgaccagacccggatcgggcggataggtcgcagcgtgacccgcacattccatgtgtcggtgtccccggccatgcgggccgcactgcgactccaaggcacgacccccgaagcgttctacggtcgacgcctgatctgcgcactgatcggggcgatcctgccgtggctgctcaacgcggtagccatcgcggtaggggcgaattccccgaacctactcatcccttcggcgctgtgtgtggcgttagctggcgctggatggatgctgccggcagcacggttgaaggctgcggccgggcccaccaacgatgactcgttcgaagcgctgctggtattcatcgatttggtcgtgctggaacggctcgccaacgaaacctccgtcgacgcgctcaccaatgcggcaaacatgtcggactcgccgctattcgtccagatccgtcaagtcctcaaccgtgcctccctggaaaacgtcgacccgtggaacgggctagaccggctagccgaggacatcaaactgcccgaactcaccgatgtggtctccatcgcccgcctccaaaacgaaggcgcctccctcgtcgacagtttccgggcccgagtcgccgagttgcgcgacgcctacctgctgcgcctgcaacaagaatccaccgccatcacccagcggcttggtttgtggacgatcctgcaagccggctcggtcatgctcatcttgctgggggcggccgccctcacactcatcacagccggataaaccgacatcgtgtcgagc

SEQ ID NO: 256 - DNA, 4249 bp, Propionibacterium acnes
  source 1..4249: mol_type = genomic DNA
gacgccggccaccccaactactccgacccacacggtgaccccagctccggcctctgccggccactcgaccagcgacgagcacccactccatacggataccgccgcagcggacaaggccagcaacgaggacgccctgtccccaatccaggtgggtttgaccgccagcgtcggactggtgctggtcgccggactgatcaccaccctcaaccgccgctaccggacccggttcacccgccagccccgcggcaaggccatgaccctgcccagcccggacgcccaaactgccgagatagcgctgcgcagcaccggggcgactgacactctgacgatcacctgcctcgaccaggcgctccgcgcgatcggcgcatggtgccaccactgcgggcacccgctgccacccctgctggccgcccgcgtcgatgacgaccggatcgacctgctgctatcccaggcggcccccgaccatcccgaggcggtggagctggccgccgacggatcggtgtggaccctcaccgccgaccggatcgacgacctgctagcccacaccgatgacaaccaagcggctccgtggccgtctctggtcacactgggacgcgacgacgacggcgcccacatcctcatcgacttggaagccgcaggaaccttgcacctgatcgccgatgacgaccaggtcgacgcggccctcgccgcgatcgccgtggaactggccacctgcgactggtccgacgaagtcaacgtcaccctcgtcggccaggtgtgcccgggcctagaagacgcactagagtctccgaccctgacccgcgccaccgacgtggacaccctcctcaccaccctagaagctcgcgccgacgaccagcgacacatcctcaccgaaggaaaccccctcgccgctcaccgagccgaccccgccatctccgacgggttcgacgccgaagtgatcctcctcgacaccgaactcaccgaagaccaccgcaaccgcctcgccagcctcgtcgaggctcttccccgcgtgtcagtcgccgcggtaacaaccagccccaccagctcagacgaatggtccctcaccctgacaggtgacccactagccgccgacctggctcccctcggctggcacatccacccccaaaccctctcccccgacctgtacaaccgcatggttgaactactcgccaactccgccgccgcagactacgaacccgccagctggtggaaccacgacgccgacgacgagcccaccaccgaccccaccaacgaggaagaatctaccccgagcaggcgagcccgcccgaatatccgcctgaccaccctgaccggcggcatcgacctatccagcgtcgacatcgacgacatcatcgacgaagccaaccaggccctcgacaacaccgaccagaccaccaaccaggttcgcgtcgacaccaaccaacccggcaccgacacccccttccccatcgacgacatcgacccgctgagctccgaccatccggtcctatccatcatcggccaccccgacatcacaggtgccactggaaccgttgggcgctccccgtggcgctgccaacagttggctctctacatcgctgagcatccgggagcatcgggggcgactatcgccgatgatttggggctatcagcgtcgacggtgcgctcgattgctacacacctgcgacactggttgggagccgacgatgccggggtggcttacatgccggcggcgacgcgcggctaccggctcgatgagcggatcgtcacagatgtggacctgatcgacgctgctgtggccggggcaggcattaacaccgctgagacggccacactggtggccattttgaagctgggccgcggacgggtcttcgctggggttcctgactcggaacttcgccagttcagggcgtcgatgtaccacgtggaggcccgcatcgtcgatgctgccctccaagtgacagaccgggccctggaagccggggacctggggctggcccggtgggcgttgacccaagggctactggtgtctcccgatcatgaggacctggtcaccggttgtctgcgcaccgagtaccaggccggcaacatggacaaggtttccgagctggtcgatcacctgtcggctaccgcacgacgcctgggcgtcgatttgagcgccgacaccacccggatcatcgactccgttattacccatacacgcaggagagcatcatgatctcccgttgcactcatctccgtcaggaaggttcctatgcaccattatcgtcttggtatcggcactgccctcatcgcggtagcagccgtggccggctgtcgctcaacagactcgacacccacaccacctccatcccgtgtctccgccacgacatcagcgagctctaccctcagcccgaccccgtcagccggagcgatcagtgccgccgacgccgaaaacatctaccgcaccgtccaagctaacaagatcgcactgtacaaaaagggtggcctggcacccggggaacccgcacccgcgacactgtcgaactacgccaccggccaggctctcaccgactacatgacctacatgcaccaaatctcggggcagggcatcaaaatcacatcggggaactcctcggttaccgcggtgcgggagaaaaagggtgataccacctaccccgaagccgctatcgccttggaatcgtgcgaagacgacagttcgattcgtaccgtggaccgccacggaaaggctgatcatggacgcattttccatgtcgacagttggtatgcccgcgataagaagggcaccgtcaagatgatcgcattcaactcaacggaggtccccacatgcgacgtcaagtaatcaccgcggccgtactgggcctggccctggccaccacctccctgcccgccctcgcaggcggcggcgacttgaacggcagtgtggacacggatggccctggttacgatgtgcgtactgaggtggattaccatcacaccaccggtggtgcgggtgggggtgccacgacagggggccatcatgggggcaaaacccacggtgatggtgaaggtgaggctattgatgggcgttctcgcgccgatgccgaagccgaactagacgaagccgaccgtaaccaggacttgacttgtgatgtcttgctcccaccggcgccgaataccccagccggccaggaatgggcgaaagaatgcaatcccccagcgaaaaaggggcagaaggccaccccgaagcccgatccggtgttagtgggccgtcacgcggccttgcagctcacccttcccggcgcggcccctcgtatcgatccgtcccccgaccttaaccggtggcactcggcagcagtgggccaggctttgtggttgtcggttgatgaccccaccgccactacgcagaaatcgatcacgtttatgggccaggttgtctcgttgagcgccaaacgtaacggtttgtcgtttgatatgggtgatggtcatgtcgtgcactgtgatgccacgacgacatggacggagtcggtggaaccggggaccccctcacccacgtgcggttacacctaccaacaggcagccccggccgggggctataaggtcaccgcaatcacgtcgtgggatgtgacctggtcggtactaggacacacgggcacagtccacatccagaaggccggtgggcagatgcttccggtcggcgagttggagtctgttgttacacggcgatgactcctgatagtccgacgctgtatgaggtgttggaggtctgccctgatgccactgatgaccagatcaagacggcgtggcgtcgtgccgcgaaagtgactcaccctgatgccggtggcactagtgaggcgttcgcggccgcccggcacgcctgggaggtgttgtctgatcctgcccggcgcaccgcctacgatgccgacctggcgggggaggatgatcccgacgacgaagccgccgacgccttcgacgttgatccgttcacggcatggccctggtgcgccccgtacatcgacgccacccccaccctgcgccacacctgccccggcacgatcaaggccatcgtggtcgccatcgccgggatcatggccggaatcggctggcaggaagcgctggaggccgtggtgtcgccgccggggtttctgggggcgtgctggatagtctcagtgccggttgtcgtcgcagtgacatggctggcagcggtgacgggtctggcatttttcaccatggcggccatctggtgtggatggtcgttgataggtggtgcgttgctgtggggccagacgtc

SEQ ID NO: 257 - DNA, 1918 bp, Propionibacterium acnes
  source 1..1918: mol_type = genomic DNA
aaccgtcatctggcgtggagtagcgagctgatgcaggaaggcaatttgtacggccttcccgaggaagacccgttgtggggcgaggccgtggagctggtagcgggacttatcccctctgtgcgggcgatgtggtcgcacgatgggcagaccgtgactgtgtcggctggccggcgggtggcgacactggggatgccgatgcggggatggcgtggtatcgagatgcgcggctggaatccagtgggcgccgatacgtggtggatcgttgaccaggtgggtagttggctggtcgatcaggatgagccgatggtcgttgacgggagggtgctccatgaggcgtgggaacggtcgcagatggtccgttcaggccgctgagaaaaaatttaggtccgccctgcatatcggggcctcttcataccttcaaaagtgtgaagggaatacagactcttcgactggaattaaaatggtatatggcgtgtccggtccgcacccagctccacgatgcgccataggggagccataacttcaccaatcgtatacgatatgagtgtaggtgagcatctaccggtggccgacagtcagatacaagcatgggcggatgaagcagaagctgattatgacctcagcatgcttccgccgtctcgacgtggtcgcccaccggtggggaggggcccgggcactgtggtccctgtgcgcttcgacgcggacactctcaaggcgttgtcacaacgagcccctgacgaaggattgaccacgcgttctgacgcgatccgtgctgcggttaaccagtggctcggcctcggctcgtaaacattatcggcgcgacaaccttactgatgacgctgttggttacgccgtagagcacatcttgtactcgtgggcgctcgacgatgctgatgatcctcgttgctggatgatgattcggtgttgacccagctggcctcctcatggagctagttatcctcatctacgacgatggctatgaactcctgatccacgccatgaaagcccgccctcagtatctgagctacttcgctatctagtgttgttgggcgagttgaactcaacttttctccgacgcaagcgccaataaaaggctgatccatccgaataccaccaaacacggctgacgtgtggaacagattcagcaagacagggtgcggtgctcgggtgcgttggggagatgaggatattcaggcttctggcgggatgtggcttgatgacgtccaggatcaccggttcggttttgaaggtgccttgcattaatgtcgacagggtcgtacgactcgaggactggatcgaccagcccgttgcgtctgaagaacttcatccaccccggtggagctccggccgcgtactggtgcaacggatcattagcatgggtagcgtgagtatgccttcgatcgtggtcagtgctgtcatcatccaaggttctgacgggcggcttctcactgtccgtaaacgaggcaccgaggcattcatgctgccaggcggcaagccggagcccggcgaggactcgcgtcaggcagtagtccgggaagtgcacgaagagctcggcgtcgcattgtcttccgacgacctgcgtcgggtgggagtgttcaccacgcgagcagcgaatgaggccggccatcaggtggtggcgacgattttcacccacaccccggttgcggtgagtgagccagctgctgagatcgagcagattcgttggctcgattggagtgtcgacgccctgcctgatgacctggccccgctgctggtcgaggcagtcatcccgtggctgcggcgccgtatccggtcggtcgctgtattcacgggtgcgaaggatggaaccgaccctcattatcgtgtcgaagcaaccgccttgggccggggtctcgcacacgccgggatcaccctggtttatggcggcgggaaggtcggg

SEQ ID NO: 258 - DNA, 4029 bp, Propionibacterium acnes
  source 1..4029: mol_type = genomic DNA
gacgatcatcacgtacccgttagatcgtcgccctgacaagatcgctgcgaacctcatcctcgacacgttgcaccgggttacccggttttggcgtgctgattcccccgatgaggaagaggctcacggtctggtgcccttccctgacactctcatcgccccagagcccgatgaggacgtcacagctagccaggccatcgccttggcggtggaccgcaactggattaccgaggacctagcccgcctcatgagccatatttactgtgacggtatgactggagctgatgcgggtcgtctgcatggctgcgctccagctacggtgcgatctcgatgccgtgatggtcgggccgtgttgcagcgcaacgccgagacgatcctggccgtctgctgatccctctcttgctcatgcctgccgccaccctacccctacctgctagaaacatagccatgtctccagcaacgcatctagcgtatcttctagcaattgatctagctatcatatagctgatgatctagctatcatatagctgtgtctccagcccaaaggacagcccaatggcatgcttgccacaggaaggtgcgtcagcctcccgaaatactggaaggagctttaccgtgcaggacatgacctcgaccagaccgattgaccgatccccgttcgaccgcactattgcggtgtggaaccacaaaggcggcacgttcaagacgtccgtcgtggcgaacctgggatacctgttcgccgccggtggcaacaaggtgttgatggtcgacatggacccccaggccaatctcgacattgacttcggtatacccgcgggagaacgtgaacggggcatgggattagccgaggcgctacgtgaggggacggcccttcccccaccgcagcatctcagcgaaaaccttcacctggtcagtggcggcccggccctccacgagttcaccgaccccgcatccttagcggccatcctcgaccgagtcaccaccgcacgctacgacctgctagctcaggcccttgccccgctggcctgggactatgacctcatcttcatcgactccgggccggcccaaactctgctgtcccagaccatccttggagtagcccgctggctggtagtgcccacccgcaccgataacgcctcaatcactggcctcgtcgacgttcaagacgccatcgacggggttgcctcctgcaaccctgaccttcaactactcggcgttgtcctagccggcgtgggggcccgggccacccggatcgccgcagataaacgccacgccatcgacacagtgctgggggcaggaaccgttttcgatgcggtcatccactactccgagaaggtgtccgtgctcgcacgccagcagggcaagaccgtcgccgagctagccaacgactaccacaacacccagcccgcctacacctacctagctaaaggccagaacatccccaacgtcgccaaggcagccgtcagcatcgaaactgattatctgaggctggccaccgagatcagcgaccgcatgttcaccagcgacgagcaggagcctgatcatgactgacgatccgactccatccgagcagaacaaccccaccagcgacgacatgcgcttggccgaagaatgggccaacagcggccgcacagtgggagccctgccgcgccgtcaacggcctcagcgacccacaccccgcaccaccagccaaccccctgtctcgtcccctgacacaccggctccgaaaaaaccccagaagacccccaccagccagcctggccgtcaacggatcaacgtcaccgtctacgttgtgcccgaactccatgagcggctgcgctcccgatcggcggcgacgggggtgacggtctcggatctggtggtgcatgcgttagcgttcgtcgccgatcatgcgggggaggcgatcgccgatgatctgcgcgtcgagacgggccccggcatgggggccggactgttcgatgtgaccccatcgcggccagtaggggtcgccaaaacccagctgggggtgcgaatgacccgccacaacaaggatggtttggaccagctgacccggacgagtggagcccgtgaccgcagccatcttgtgtctgtcgccgtgcgcgactatctcgactccaaccctgtaaagaaaggccgacatgtccgctgatgaaactcctgccgcccggggtgggcgacgctttgatacgaccgtcaagcccaggcgccgtcccatgcttatcgccgccggtatcgccatcgtgatagtcggcgcgctcctcatcactcagttgattcgctccgcccaaaccgagcatcgcgtgctggaagtccacgccgatgtggctcgcggcgaggtcatccgtgacaccgatctggtatcggtgactgtcggccaggtcgacaacgtatcaacggttcccgcagaccagctcgactcactggtcggcaaacgcgccacggcagatcttcgagccggatcactcttacctgctggggctatcggcccggccgatgtcgttccagctccgggcaagtcgctggtcgggctgaagctagccgccggacagatccctatcggagaccttgctgccgggacgaagctgcgcctgatccagacgtcggcacccagcggctcatccaccaccactgatagcagcaccaataccgatggccagtcgtgggaggcaacaatggcgaccggcaccaaaaagaccgagcaggtcaccttgatcaacgccgaagtgaactcgcgtgatgccgcccggatcgcccaactgacgtcacagggccgtatcgccgtagtgaaggatccgatccgatgagcaccattgttttgaccagcgtctcgggagccccaggggtcaccacgacagcgatcgggctgggcagggtctggccacaatcgagcctggtcgtcgaggatgacacccaccacgccatgctggcgggctacctgcgagcctcccagcacgccgaaccgaacctggccgcagtggcgaacctgacgtcgactccaaccaacgcccaaacggtgtgggaatctatcgccagacccctacccaccgatgacccagtcggcgggctgcgacgcaaaggcatcctcggcccgcccacgccgtggtctcgcgcaggcatcgacccccgatggggattcatgctggccctgtggcggcaactggaggaggctggcatcgacaccatcatcgatttgggtcgcctagccacaccactgacctcaacgccacacctgatcgccgcacccatcgtcgaggacgccgacatgatcttggtgatgatcgaggcgacactacgcgacatcgccggcgcccgcacgatggtggagggactcgctgagcagatgaacttggccggcgcctaccgacgtctcggactgcttgtccaccgtggcggccaggcccgcggcgtcgccgagttcaatgacaaggagatcacctcggcgttacgactcccggtcatcggggccattacccatgacccggccggagccgcccaactctccgacggggtcgggcagcggttcgacaagtcacgtctggcccactcactatcaaaggtggcggccagcctcgtcgatgccataaacaagcgccacgctgatgacgaggaggatctgtgatggccagttttgctgataatccgttcgacaagctgcgctcccaggatgcggcaagagcttcggtagagcaggagcctgatgccggattagcgtcggagttgttttcgacgtcgtcggggtgggccagctctcagcaggtgtcccaagctcaaccggtgatgacccgttcggagaacgtggattggtcggttgtcgcggagctagccagtacggccactgatgaggttgaggctgagatcagccggtggagttccactcatgatggggtggcgacgctagacattcgccaggccatcgcggagcctgctattgcctcggcggtgtctacgtatgctgaccgacgccagatcgatgtaggggagacctggcctgatctggtacgccagcgataccgcaaggctgtgtgggatcag

SEQ ID NO: 259 - DNA, 4013 bp, Propionibacterium acnes
  source 1..4013: mol_type = genomic DNA
acccttccagcccagcaccacccactacaccgacacgatccacgaagctgaaaccgaacctcccatccccgtccgaaacatcaacgaactcatcaaccccaccaaccatgcatgaacgcacgatcgcctaccggccagccttcctgcgcgacgtgaagcggctcaaaaacaagcactacaacatgaacacacactcaaatgggcggtaaggtcacgaagtcgacgtggctgcctcacggatggcttcggcgagctcttggggtcgactccacatgggccagtggccggttggcagatccatcgcggtgaagttggtcaggtgcgcgacggcgctgaacatcggattgcctgctgcggccagctcgaggacctggacgctgggaatggagcagcagatcaacgtggttagtacatcatggcgagcgctattggacagcgcgacccgtgcccgggccacttgcgcgggttcaggaaccgcccgtgcccggaaccggtcaaggtgctcgttgctgaggccctctaaactggcctgcttgccgagagtatcgaagtcaggaagtggcagctcagctgtttcctcaggtagatctggtgcgaaggcacctccatcgctcatgggaccggagtccacccagacgatccgatggaccaactctgggtgcctgtctacaactaggctcaccggcccgttcgcgccactgtgtcccaccaggaccgcatcgccgcccatctcgtccaggatggctgagatggcgtcagcttggtcgtcgagcgtgcgcgtagtgcgctgggtgtcctccggatcgagacctggcagcgtcagccccacggctcgactgccagcagtgttcaataactcgactacctcgtcccaagcccaggctccgagccagtaaccaggaacgaggacgataggccgatgctggtcaggtcgcgatgttgaagtcatggagacatagttgcacagtgcgcggacaagggagtggcactatttctggcatgaatttagatctgggtgtccggtgaggcgatcagaacgcctccatgtactgtccgagtgtctaggatgcagcggacacagtcgagcagctggctcacaagtttccaggtgtccttctgcccctatgagggaagtcggctgctctcgcaacctttgagggctgctctggggtcggaaccagttacagatcgttcaagttccgggaactaccgccggtcacgctgattgattcccgggcgatctcgcttctgacgacagtggtcggtgaccgagaggagtcctactctgaccccgctgctgcggtgagtaaatcacgggcgtcccggatccggccacccgtccaagtgccagccagcttgatcggctaggcatcgtcaaggagcgacgatgaggtgatgatgcgatgtgagcgcaccgcgaagtgaggtataaagaagccttcccgggcgcatgcgtcgcccaggaaggccaggttggcccctggacggctgaatggttgggcggatcaggctgtagcggagacgtgcagtacctcgtaggcgatggcgttggttgggctctggtctgcatcgtggctactgagttcgacgaggatgacggtccaggtggtgatgtcgacggcggtgacgcgggcgatggtggaatcagtggatgctgcaaggaagtcggcggttatgtcttcgatgcagtgggacggagcagtgctggtgggcaggggcacggtcttgacggtcaggcttcgggcagcagagtaatcggcggttccgttaacaagctggtggacggtccagtcctggatcgggtgccggccgaagtcgcgtacgatagccgagtaaccaagttcgccccagcagaactggcgcatcccctctatgtcgcgccagacgtagaagggcgcgtaggagttctggggtgcgcctttgaccttttcttggatgaggtaggccttgaactccagtccatggtagccgtccatgaggtgtccagtctggatgacgcggtcgcggatgatctgcatgtcatagtcggtgggcagggtgatctgatattgcatggcgtacatcagcggttctccttggtttcgtgggagtaggtcgtgggggtgacgggttcctgccaatcgatggttgacaagtcgtcggcggcttgttggtaggtaaggtggatcattggctgtttgagtgcagcgccatgccagtgtctctggccggcgtcgatccagatggattcgcccttggtcaggtgctggggtgcttgtccttcaatatggaccagggcaacgccgcccgtgacgtagaggccctgtcccttggggtgtgtgtgcctcagcggcaaacgtgacggcgtgggcggcacgcccggcgtcttccgtggcacgatcggccggatccatggcggcgcgcagctgctgttctgcagccaggcgtccaggtcacggcgggcagcatcgacacccagggcagcctcgacggcttcagggctacgacgctggccgggctggttgaccgcagaccactggtgccgggcgtcgtccagatcatggccggcggcgtcgatgagggcggtggtggcttcggcgcagcatcgcctgatccactccgaacgtgacaggccagctgtctcggcggcactgtcaatgcgcgccaggagagatttcatgggcgctcatctgtagcctccagataggcgttgatgtagcgcagagcctgatccgtcatgtcgatggcggctgcctcggcagacgacacaacgggctgtggatgataagaccacccaacatagacggcgaacatcaatttctcgacagctttcatgaggtccccggcggcaaccgcatccgcctcatcatccgaggagaaccacttcaggtctgaacggctgtacatagcccctaggtcctgatgtgggtcgaggtccttggaatgatggaagttcctacacacccatcgccaaagacctcaacatggacaacgctaccttcaccactccctcatctgtgaagagccagtttatgcacggtgttgaaagaggcgtcggtctacgacgaatgcgggttaatggtcttgcggtgtggggcgctgggcgatggcatcgagaacgcgtgagtgggtggcgatccattcggccgcgtcggggttgatgttgcgggcgacggtgtcgatcgctgttacgtagtgggcaagcctgcgaatctcagcttgttggtcagggtgagcgctgatgaggggctcttgatgggaggcgcggttacggacgtggcggatgagctccacgttttcctcgaagtcgcgtcggctacgccccgggtagtgaggcatacctccgttacgtaagtcagtgagagctttccatacggttgcttccaggcgcggggtgagcagaaagcgccagttgtccagtgacagactcgccacgatctgatcaggggtcgcatcgagcctcgcgcgccgcagtcgcttctcggccctgtcgacgttacgcgggaaaccaccgagccgatagctcggggattcccaccaacgccgtatgccagtatcggcgctcaggcgcacgtcaatgaagtttctcaggagtacctcgacatggctgatgtcttccaagaacgctttcgagatgcgggtgttccacacgtaccacgcatcgactggttcgatccggtagcggctgagcctggcgggtgagaaccactcctgcaacgtctcacgactcaccgtgggagcgtggtaagattgatgacgataggcctcgggaaggtcaatgccgcgaaatatcggtatacccccgaggtcattgtcttgcccaggcccctcctcgcatacttgcggggcgtcattggctgccgtcatctcgtctcttcccggtacgtggctgtccatgttcacgggcaggtacggcaatgaggttcccgcacacaaacctctaccaaacatacgctggcaagccgttgcatgagacgacgcctccgcccgccacaccaacggtcaccgccacggccacggtgacggtgaccgtg

SEQ ID NO: 260 - DNA, 3969 bp, Propionibacterium acnes
  source 1..3969: mol_type = genomic DNA
gacgatcatcacgtacccgttagatcgtcgccctgacaagatcgctgcgaacctcatcctcgacacgttgcaccgggttacccggttttggcgtgctgattcccccgatgaggaagaggctcacggtctggtgcccttccctgacactctcatcgccccagagcccgatgaggacgtcacagctagccaggccatcgccttggcggtggaccgcaactggattaccgaggacctagcccgcctcatgagccatatttactgtgacggtatgactggagctgatgcgggtcgtctgcatggctgcgctccagctacggtgcgatctcgatgccgtgatggtcgggccgtgttgcagcgcaacgccgagacgatcctggccgtctgctgatccctctcttgctcatgcctgccgccaccctacccctacctgctagaaacatagccatgtctccagcaacgcatctagcatatcttctagcaattgatctagctaccatatagctgatgatctagctatcatatagctgtgtctccagcccaaaggacagcccaatggcatgcttgccacaggaaggtgcgtcagcctcccgaaatactggaaggagctttaccgtgcaggacatgacctcgaccagaccgattgaccgatccccgttcgaccgcactattgcggtgtggaaccacaaaggcggcacgttcaagacgtccgtcgtggcgaacctgggatacctgttcgccgccggtggcaacaaggtgttgatggtcgacatggacccccaggccaatctcgacattgacttcggtatacccgcgggagaacgtgaacggggcatgggattagccgaggcgctacgtgaggggacggcccttcccccaccgcagcatctcagcgaaaaccttcacctggtcagtggcggcccggccctccacgagttcaccgaccccgcatccttagcggccatcctcgaccgagtcaccaccgcacgctacgacctgctagctcaggcccttgccccgctggcctgggactatgacctcatcttcatcgactccgggccggcccaaactctgctgtcccagaccatccttggagtagcccgctggctggtagtgcccacccgcaccgataacgcctcaatcactggcctcgtcgacgttcaagacgccatcgacggggttgcctcctgcaaccctgaccttcaactactcggcgttgtcctagccggcgtgggggcccgggccacccggatcgccgcagataaacgccacgccatcgacacagtgctgggggcaggaaccgttttcgatgcggtcatccactactccgagaaggtgtccgtgctcgcacgccagcagggcaagaccgtcgccgagctagccaacgactaccacaacacccagcccgcctacacctacctagctaaaggccagaacatccccaacgtcgccaaggcagccgtcagcatcgaaactgattatctgaggctggccaccgagatcagcgaccgcatgttcaccagcgacgagcaggagcctgatcatgactgacgatccgactccatccgagcagaacaaccccaccagcgacgacatgcgcttggccgaagaatgggccaacagcggccgcacagtgggagccctgccgcgccgtcaacggcctcagcgacccacaccccgcaccaccagccaaccccctgtctcgtcccctgacacaccggctccgaaaaaaccccagaagacccccaccagccagcctggccgtcaacggatcaacgtcaccgtctacgttgtgcccgaactccatgagcggctgcgctcccgatcggcggcgacgggggtgacggtctcggatctggtggtgcatgcgttagcgttcgtcgccgatcatgcgggggaggcgatcgccgatgatctgcgcgtcgagacgggccccggcatgggggccggactgttcgatgtgaccccatcgcggccagtaggggtcgccaaaacccagctgggggtgcgaatgacccgccacaacaaggatggtttggaccagctgacccggacgagtggagcccgtgaccgcagccatcttgtgtctgtcgccgtgcgcgactatctcgactccaaccctgtaaagaaaggccgacatgtccgctgatgaaactcctgccgcccggggtgggcgacgctttgatacgaccgtcaagcccaggcgccgtcccatgcttatcgccgccggtatcgccatcgtgatagtcggcgcgctcctcatcactcagttgattcgctccgcccaaaccgagcatcgcgtgctggaagtccacgccgatgtggctcgcggcgaggtcatccgtgacaccgatctggtatcggtgactgtcggccaggtcgacaacgtatcaacggttcccgcagaccagctcgactcactggtcggcaaacgcgccacggcagatcttcgagccggatcactcttacctgctggggctatcggcccggccgatgtcgttccagctccgggcaagtcgctggtcgggctgaagctagccgccggacagatccctatcggagaccttgctgccgggacgaagctgcgcctgatccagacgtcggcacccagcggctcatccaccaccactgatagcagcaccaataccgatggccagtcgtgggaggcaacaatggcgaccggcaccaaaaagaccgagcaggtcaccttgatcaacgccgaagtgaactcgcgtgatgccgcccggatcgcccaactgacgtcacagggccgtatcgccgtagtgaaggatccgatccgatgagcaccattgttttgaccagcgtctcgggagccccaggggtcaccacgacagcgatcgggctgggcagggtctggccacaatcgagcctggtcgtcgaggatgacacccaccacgccatgctggcgggctacctgcgagcctcccagcacgccgaaccgaacctggccgcagtggcgaacctgacgtcgactccaaccaacgcccaaacggtgtgggaatctatcgccagacccctacccaccgatgacccagtcggcgggctgcgacgcaaaggcatcctcggcccggccacgccgtggtctcgcgcaggcatcgacccccgatggggattcatgctggccctgtggcggcaactggaggaggctggcatcgacaccatcatcgatttgggtcgcctagccacaccactgacctcaacgccacacctgatcgccgcacccatcgtcgaggacgccgacatgatcttggtgatgatcgaggcgacactacgcgacatcgccggcgcccgcacgatggtggagggactcgctgagcagatgaacttggccggcgcctaccgacgtctcggactgcttgtccaccgtggcggccaggcccgcggcgtcgccgagttcaatgacaaggagatcacctcggcgttacgactcccggtcatcggggccattacccatgacccggccggagccgcccaactctccgacggggtcgggcagcggttcgacaagtcacgtctggcccactcactatcaaaggtggcggccagcctcgtcgatgccataaacaagcgccacgctgatgacgaggaggatctgtgatggccagttttgctgataatccgttcgacaagctgcgctcccaggatgcggcaagagcttcggtagagcaggagcctgatgccggattagcgtcggagttgttttcgacgtcgtcggggtgggccagctctcagcaggtgtcccaagctcaaccggtgatgacccgttcggagaacgtggattggccggttgtcgcggagctagccagtacggccactgatgaggttgaggctgagatcagccggtggagttccactcatgatggggtggcgacgctagacattcgccaggccatcgcggagcctgctattgcctcggcggtgtctacgtatgctgaccgacgccagatcgat

SEQ ID NO: 261 - DNA, 4012 bp, Propionibacterium acnes
  source 1..4012: mol_type = genomic DNA
acccttccagcccagcaccacccactacaccgacacgatccacgaagctgaaaccgaacctcccatccccgtccgaaacatcaacgaactcatcaaccccaccaaccatgcatgaacgcacgatcgcctaccggccagccttcctgcgcgacgtgaagcggctcaaaaacaagcactacaacatgaacacacactcaaatgggcggtaaggtcacgaagtcgacgtggctgcctcacggatggcttcggcgagctcttggggtcgactccacatgggccagtggccggttggcagatccatcgcggtgaagttggtcaggtgcgcgacggcgctgaacatcggattgcctgctgcggccagctcgaggacctggacgctgggaatggagcagcagatcaacgtggttagtacatcatggcgagcgctattggacagcgcgacccgtgcccgggccacttgcgcgggttcaggaaccgcccgtgcccggaaccggtcaaggtgctcgttgctgaggccctctaaactggcctgcttgccgagagtatcgaagtcaggaagtggcagctcagctgtttcctcaggtagatctggtgcgaaggcacctccatcgctcatgggaccggagtccacccagacgatccgatggaccaactctgggtgcctgtctacaactaggctcaccggcccgttcgcgccactgtgtcccaccaggaccgcatcgccgcccatctcgtccaggatggctgagatggcgtcagcttggtcgtcgagcgtgcgcgtagtgcgctgggtgtcctccggatcgagacctggcagcgtcagccccacggctcgactgccagcagtgttcaataactcgactacctcgtcccaagcccaggctccgagccagtaaccaggaacgaggacgataggccgatgctggtcaggtcgcgatgttgaagtcatggagacatagttgcacagtgcgcggacaagggagtggcactatttctggcatgaatttagatctgggtgtccggtgaggcgatcagaacgcctccatgtactgtccgagtgtctaggatgcagcggacacagtcgagcagctggctcacaagtttccaggtgtccttctgcccctatgagggaagtcggctgctctcgcaacctttgagggctgctctggggtcggaaccagttacagatcgttcaagttccgggaactaccgccggtcacgctgattgattcccgggcgatctcgcttctgacgacagtggtcggtgaccgagaggagtcctactctgaccccgctgctgcggtgagtaaatcacgggcgtcccggatccggccacccgtccaagtgccagccagcttgatcggctaggcatcgtcaaggagcgacgatgaggtgatgatgcgatgtgagcgcaccgcgaagtgaggtataaagaagccttcccgggcgcatgcgtcgcccaggaaggccaggttggcccctggacggctgaatggttgggcggatcaggctgtagcggagacgtgcagtacctcgtaggcgatggcgttggttgggctctggtctgcatcgtggctactgagttcgacgaggatgacggtccaggtggtgatgtcgacggcggtgacgcgggcgatggtggaatcagtggatgctgcaaggaagtcggcggttatgtcttcgatgcagtgggacggagcagtgctggtgggcaggggcacggtcttgacggtcaggcttcgggcagcagagtaatcggcggttccgttaacaagctggtggacggtccagtcctggatcgggtgccggccgaagtcgcgtacgatagccgagtaaccaagttcgccccagcagaactggcgcatcccctctatgtcgcgccagacgtagaagggcgcgtaggagttctggggtgcgcctttgaccttttcttggatgaggtaggccttgaactccagtccatggtagccgtccatgaggtgtccagtctggatgacgcggtcgcggatgatctgcatgtcatagtcggtgggcagggtgatctgatattgcatggcgtacatcagcggttctccttggtttcgtgggagtaggtcgtgggggtgacgggttcctgccaatcgatggttgacaagtcgtcggcggcttgttggtaggtaaggtggatcattggctgtttgagtgcagcgccatgccagtgtctctggccggcgtcgatccagatggattcgcccttggtcaggtgctggggtgcttgtccttcaatatggaccagggcaacgccgcccgtgacgtagaggccctgtcccttggggtgtgtgtgcctcagcggcaaacgtgacggcgtgggcggcacgcccggcgtcttccgtggcacgatcggccggatccatggcggcgcgcagctgctgttctgcagccaggcgtccaggtcacggcgggcagcatcgacacccagggcagcctcgacggcttcagggctacgacgctggccgggctggttgaccgcagaccactggtgccgggcgtcgtccagatcatggccggcggcgtcgatgagggcggtggtggcttcggcgcagcatcgcctgatccactccgaacgtgacaggccagctgtctcggcggcactgtcatgcgcgccaggagagatttcatgggcgctcatctgtagcctccagataggcgttgatgtagcgcagagcctgatccgtcatgtcgatggcggctgcctcggcagacgacacaacgggctgtggatgataagaccacccaacatagacggcgaacatcaatttctcgacagctttcatgaggtccccggcggcaaccgcatccgcctcatcatccgaggagaaccacttcaggtctgaacggctgtacatagcccctaggtcctgatgtgggtcgaggtccttggaatgatggaagttcctacacacccatcgccaaagacctcaacatggacaacgctaccttcaccactccctcatctgtgaagagccagtttatgcacggtgttgaaagaggcgtcggtctacgacgaatgcgggttaatggtcttgcggtgtggggcgctgggcgatggcatcgagaacgcgtgagtgggtggcgatccattcggccgcgtcggggttgatgttgcgggcgacggtgtcgatcgctgttacgtagtgggcaagcctgcgaatctcagcttgttggtcagggtgagcgctgatgaggggctcttgatgggaggcgcggttacggacgtggcggatgagctccacgttttcctcgaagtcgcgtcggctacgccccgggtagtgaggcatacctccgttacgtaagtcagtgagagctttccatacggttgcttccaggcgcggggtgagcagaaagcgccagttgtccagtgacagactcgccacgatctgatcaggggtcgcatcgagccccgcgcgccgcagtcgcgcctcggccctggcgacgttacgcgggaaaccaccgagccgatagctcggggattcccaccaacgccgtatgccagtatcggcgctcaggcgcacgtcaatgaagtttctcaggagtacctcgacatggctgatgtcttccaagaacgctttcgagatgcaggtgttccacacgtaccacgcatcgactggttcgatccggtagcggctgagcctggcgggtgagaaccactcctgcaacgtctcacgactcaccgtgggagcgtggtaagattgatgacgataggcctcgggaaggtcaatgccgcgaaatatcggtatacccccgaggtcattgtcttgcccaggcccctcctcgcatacttgcggggcgtcattggctgccgtcatctcgtctcttcccggtacgtggctgtccatgttcacgggcaggtacggcaatgaggttcccgcacacaaacctctaccaagcatacgctggcaagccgttgcatgagacgacgcctccgcccgccacaccaacggtcaccgccacggccacggtgaccgtgaccgtg

SEQ ID NO: 262 - DNA, 811 bp, Propionibacterium acnes
  source 1..811: mol_type = genomic DNA
attttgtccacccacccctgtcgattttgtccgccaagtattagacaaaccattagacagtgaattagaccctgggtcgcgtcagcgtgttagctcaccaacgcgcgcgcgcgcggcggccgagccgccgaagccaaagaaacccataccaccaacgcctgaaccagcagcccccgcttcagacagtcctgtgtcagcgcacgctgatgaggctgccgagttggcgtggcagttcgtggggtggtgtcctcagctggtaggggcaccgaagaaggtgcgtggccagctccgtcagctggtcgctgccgagatccgccggaatccgggctggctggatgcgccagcgttggaggttgttgcccagcgggtacgtgctgaaggtgcgctgggggtccagcactgcgagattgtgcgagccgagctgcacggggtgatcgccgaccagaaggccgcccccgcccgccccgacgccctgcacgcgcgggagcccaagtggtgggacgacgtgtactacgaaggaaacacaaccgtgtggacgtacgactctgacgaaaccagtgacgacgacgaggcgtggaaccggtcgcaggtatgtcatgttgctgagcgtgacgacatggctggcgggattgctaccaacctgctggcctcccacgctgatgatccgatggcctggctgactcgccgtcaaaccatgctgatggctcgtttcccccacgcccagaacgaggtcaccgcgatgtgccaaatcgtgcgcaccgccctggaggccgacctggccgccggaacccggtgggaggaccgatgaggg

SEQ ID NO: 263 - DNA, 3790 bp, Propionibacterium acnes
  source 1..3790: mol_type = genomic DNA
tagccgacacggcggaccgtgcccctgacagtaagcggcactactggagacatcaccatgaccgctcagatcctcgccccgtgcaaccagaaggctgccgtcatcgaaggagccctgccatgaaccaacctaccccccacaaggccgacgagtcacagacgagcaacaccacgaggaagtggcggcacaaggtgtcgttctaccaagacccggccgacaccgaccgagtccgcggagcgatcctccacaccatgacaaccgaaggcaaccggaacctgagccagttcgtcaacgatgccgtcatggccaaggtgaccgaactggaagcaaaatacaaccacggcgagccattccccgccgtgggagcccgaggactcccccagggcggcgcagccgccaacagataagagggcggggaccaccaatagcagtcgatttcggatccagatcgggtagacaggacccatgatgaatttcatatcctccctgctctcggccatcctgaccctctttgcgatggtagccgtggcgataggagtggtgaacattgtgccgggaatatgcgccatcatcggtgcacggaaatacggcgaccaggaccgtgtgcgggcaggacaacgaaagatccttcttggtgctatcgccttggtggtagcagtaggcattcacccgtgacccacggttaccggaagccccgccgcaatcgataccactgtcagtaccatcaggggcgataggggtcaagctctccttgtcacaatcccttccccggcagcccagtaaccgtcgcttacagccatacatggatatgcgcccattcgtcggcaccgacgccgtgcgggttggcgacgctgacccgtctgctcacaaacgacccttccagcccagcaccacccactacaccgacacgatccacgaagctgaaaccgaacctcccatccccgtccgaaacatcaacgaactcatcaaccccaccaaccatgcatgaacgcacgatcgcctaccggccagccttcctgcgcgacgtgaagcggctcaaaaacaagcactacaacatgaacacacactcaaatgggcggtaaggtcacgaagtcgacgtggctgcctcacggatggcttcggcgagctcttggggtcgactccacatgggccagtggccggttggcagatccatcgcggtgaagttggtcaggtgcgcgacggcgctgaacatcggattgcctgctgcggccagctcgaggacctggacgctgggaatggagcagcagatcaacgtggttagtacatcatggcgagcgctattggacagcgcgacccgtgcccgggccacttgcgcgggttcaggaaccgcccgtgcccggaaccggtcaaggtgctcgttgctgaggccctctaaactggcctgcttgccgagagtatcgaagtcaggaagtggcagctcagctgtttcctcaggtagatctggtgcgaaggcacctccatcgctcatgggaccggagtccacccagacgatccgatggaccaactctgggtgcctgtctacaactaggctcaccggcccgttcgcgccactgtgtcccaccaggaccgcatcgccgcccatctcgtccaggatggctgagatggcgtcagcttggtcgtcgagcgtgcgcgtagtgcgctgggtgtcctccggatcgaggccaggcagcgtcagccccacggctcgactgccagcagtgttcaataactcgactacctcgtcccaagcccaggctccgagccagtaaccaggaacgaggacgataggccgatgctggtcaggtcgcgatgttgaagtcatggagacatagttgcacagtgcgcggacaagggagtggcactatttctggcatgaatttagatctgggtgtccggtgaggcgatcagaacgcctccatgtactgtccgagtgtctacgatgcagcggacacagtcgagcagctggctcacaagtttccaggtgtccttctgcccctatgagggaagtcggctgctctcgcaacctttgagggctgctctggggtcggaaccagttacagatcgttcaagttccgggaactaccgccggtcacgctgattgattcccgggcgatctcgcttctgacgacagtggtcggtaaccgagaggcgtcctactctgaccccgctgctgcggtgagtaaatcacgggcgtcccggatccggccacccgtccaagtgccagccagcttgatcggctaggcatcgtcaaggagcgacgatgaggtgatgatgcgatgtgagcgcaccgcgaagtgaggtataaagaagccttcccgggcgcatgcgtcgcccaggaaggccaggttggcccctggacggctgaatggttgggcggatcaggctgtagcggagacgtgcagtacctcgtaggcgatggcgttggttgggctctggtctgcatcgtggctactgagttcgacgaggatgacggtccaggtggtgatgtcgacggcggtgacgcgggcgatggtggaatcagtggatgctgcaaggaagtcggcggttatgtcttcgatgcagtgggacggagcagtgctggtgggcaggggcacggtcttgacggtcaggcttcgggcagcagagtaatcggcggttccgttaacaagctggtggacggtccagtcctggatcgggtgccggccgaagtcgcgtacgatagccgagtaaccaagttcgccccagcagaactggcgcatcccctctatgtcgcgccagacgtagaagggcgcgtaggagttctggggtgcgcctttgaccttttcttggatgaggtaggccttgaactccagtccatggtagccgtccatgaggtgtccagtctggatgacgcagtcgcggatgatctgcatgtcatagtcggtgggcagggtgatctgatattgcatggcgtacatcagcggttctccttggtttcgtgggagtaggtcgtgggggtgacgggttcctgccaatcgatggttgacaagtcgtcggcggcttgttggtaggtaaggtggatcattggctgtttgagtgcagcgccatgccagtgtctctggccggcgtcgatccagatggattcgcccttggtcaggtgctggggtgcttgtccttcaatatggaccagggcaacgccgcccgtgacgtagaggccctgtcccttggggtgtgtgcctcagcggcaaacgtgacggcgtgggcggcacgcccggcgtcttccgtggcacgatcggccggatccatggcggcgcgcagctgctgttctgcagccaggcgtccaggtcacggcgggcagcatcgacacccagggcagcctcgacggcttcagggctacgacgctggccgggctggttgaccgcagaccactggtgccgggcgtcgtccagatcatggccggcggcgtcgatgagggcggtggtggcttcggcgcagcatcgcctgatccactccgaacgtgacaggccagctgtctcggcggcactgtcatgcgcgccaggagagatttcatgggcgctcatctgtagcctccagataggcgttgatgtagcgcagagcctgatccgtcatgtcgatggcggctgcctcggcagacgacacaacgggctgtggatgataagaccacccaacatagacggcgaacatcaatttctcgacagctttcatgaggtccccggcggcaaccgcatccgcctcatcatccgaggagaaccacttcaggtctgaacggctgtacatagcccctaggtcctgatgtgggtcgaggtccttg

SEQ ID NO: 264 - DNA, 3861 bp, Propionibacterium acnes
  source 1..3861: mol_type = genomic DNA
gctgagaaaaattttgggtccgccctgcatatcggggcctcttcataccttcaaaagtgtgaaggggaatacagactcttcgactggaattaaaatggtatatggcgtgtccgggccgcacccagctccacgatgcgccataggggagccataacttcaccaatcgtatacgatatgagtgtgggtgagcatctaccggtggccgacagtcagatacaagcatgggcggatgaagcagaagctgattatgacctcagcatgcttccgccgtctcgacgtggtcgcccaccggtggggaggggcccgggcactgtggtccctgtgcgcttcgacgcggacactctcaaggcgttgtcacaacgagcccatgacgaaggattgaccacgcgttctgacgcgatccgtgctgcggttaaccagtggctcggcctcggctcgtaaacattatcggcgcgacaaccttactgatgacgctgttggttacgccgtagagcacatcttgtactcgtgggcgctcgacgatgctgatgatcctcggtgctggatgatgattcggtgttgacccagctggcctcctcatggagctagttatcctcatctacgacgatggctatgaactcctgatccacgccatgaaagcccgccctcagtatctgagctacttcgctatctagtgttgttgggcgagttgaactcaacttttctccgacgcaagcgccaataaaaggctgatccatccgaataccaccaaacacggctgaagtgtggaacagattcagcaagacagggtgcggtgctcgggtgcgttggggagatgaggatattcaggcttctggcgggatgtggcttgatgacgtccaggatcaccggttcggttttgaaggtgccttgcattaatgtcgacagggtcgtacgactcgaggattggatcgaccagcccgttgcgtctgaagaacttcatccaccccggtggagctccggccgcgtactggtgcaacggatcattagcatgggtagcgtgagtatgccttcgatcgtggtcagtgctgtcatcatccaagattctgacgggcggcttctcactgtccgtaaacgaggcaccgaggcattcatgctgccaggcggcaagccggagcccggcgaggactcgcgtcaggcagtagtccgggaagtgcacgaagagctcggcgtcgcattgtcttccgacgacctgcgtcgggtgggagtgttcaccacgcgagcagcgaatgaggccggccatcaggtggtggcgacgattttcacccacaccccggttgcggtgagtgagccagctgctgagatcgagcagattcgttggctcgattggagtgtcgacgccctgcctgacgacctggccccgctgctggtcgaggcagtcatcccgtggctgcggcgccgtatccggtcggtcgctgtattcacgggtgcgaaggatggaaccgaccctcattatcgtgtcgaagcaaccgccttgggccggggtctcgcacacgccgggatcaccctggtttatggcggcgggaaggtcgggatgatgggtgctgttgctgatgcggccctcgctgctggcggcgctgtgatcggagtgatgccgcagcacttggtggacggggagatcgcccatcctagtctgactcacctcgaggtagtgcggactatgcatgagcgcaagcagcggatgagtgacctagctgacgcgttcgtcgcgctacccggcggcggcggaacccttgacgagctattcgaagcatggacatggcagcagctcggtgtacacagcaaacccgtggccttgtacgactcgaccttctgggcaccgctgaccgcgctactcaaccacatgaccatcgaaggcttcatccgccctgaggaccgcgcctcgctcgtgatcgccgataccatacatcagctgatggccgatcttgagggatggaccccaccaccaccgaagtggcgctcgtgacatagaacaaatgattctgactatggctcattgacatctgcgcagcggctactagctccattgacttcaaatcgggccttggccgaggctcggttcaggtggcccggaatggatccccacaaattgaatgctcatgatcgaggtgatgaacgcccactctattgtcctacgcccggttgtatccagcgagcaattgaaggtgctgcgcctgttggtcgaccaggccgagccactcatcatcgacgggcgcatcttgtacgaggcatgggacaggctgcaaacagcccgtccggcccgctagaaaaaatttttagggcccgctccgcacatcccggtctgtacccacaccttcaagggtgtgaagggaataaaaacacacctaacaacaactttgtttcatgatttggcgcgtcggaccctttctgaccgatgtcgtgcgcaacaatggacccatgagttcgcctaccaagatgcgccggaaggggacacgcggcccgaaacctcgcagcgacgaggagctaacggctgtgatgttccgcgtcccagagtcagtggccgaacgtgtcagcgatatggcttgggagctgaggctctcccgatccgatcttgtgggctggtcggccctctatgcactcaactcgatgctcagacagcgcggagaggacacgattccggttccggagtatctggacaaggccgtgctcgctgcgttgtatcccgatgggttgcccttcgacgaggacaacgaggagccgggcgagaatgccgggcaggaggagcttgcgatgactggatgagcccgaacatggttgaaggccgccccgccaggcgaccttcaatcaatggtttcggttgtcagctgcagccacccttgccaggtgctgtggttcttctccagaggaggagggaccgccatgaagaccaagaagacctagaagatccaaaagaaccggtttcggctgttgcttcggtcttcatggtagctgatagcccgcgtcgttggaagtgcgacgacgccgatcctcatcggtatcgcaccctgttccagggtcgagaatgtgaaggattaacaaccatgacaagtcatgaggcgtcctcccggagggcgtcatgaccgctttaattcaagctctgccgacagctgaactgtctgctggacctggtgctagcggtccagctagaccctctgctgagggcttcatcaagattcatcacgaccttattagtgcgggcgtgtcgggtaacgcgatggcgttgttcgtcgcgttacgtaaccagcccggctgtgatcagtggacccgtcactcgtacctgcggctagcccaatggtgcggctgggatgggctgtcggaggcggcgggctgtaagcgggtgcagcgggccgctgctgagctcgctagcggtggttggctggaatcgcgggtcggccatgatcgtcgcaccgctaagacgctggtgtggcatcggttgaccagccccgacaccgaccgctgggagcaattgccgcggattgtgtgggcgaggatctgccagatcgccggggagacgtcgggagagtgggtgaggcattggctggtgtggcggatgctggccggtcgtactggtgtggctcaggcccctatgtccatcgtggctcggttcctgggctgttcttcgcgccaggtctctcatatccgtggggctctcgttgatgccggtctgctcggctgtgacgaggtgtcgggggcggcgagccgggtgtggttcccctcgatggccgaggagtgtgcagcggatcgtgaggtggtcgatggggccgtcgtcggtgctggggtgggctctggtgaaggtgtcgaggagggcggggaacccctgtcgattttgtccacccacccctg

SEQ ID NO: 265 - DNA, 2093 bp, Propionibacterium acnes
  source 1..2093: mol_type = genomic DNA
caggtgggtttgaccgccagcgtcggattggtgctggtcgctgggctgatcaccactctcaaccgtcgttaccggacccggttcacccgccagccccgcggcaaggccatgaccctgcccagcccggacgcccaaactgccgagatagcgctgcgcagcaccagagcagccgagactctgacgatcacctgcctcgaccacgcgctccgcgcgatcggcgcatggtgccaccactgcgggcacccgctgccacccctgctggccgcccgcgtcgatgacgaccggatcgacctgctgctatcccaggcggcccccgaccatcccgaggcggtggagctggccgccgacggatcggtgtggaccctcaccgccgaccggatcgacgacctgctagcccacaccgatgacaaccaagcggctccgtggccgtctctggtcacactgggacgcgacgacgacggcgcccacatcctcatcgacttggaagccgcaggaaccttgcacctgatcgccgatgacgaccaggtcgacgcggccctcgccgcgatcgccgtggaactggccacctgtgactggtccgacgaggtcaacgtcaccctggtcggccaggtgtgcccgggcctagaagacgcactagagtctccgaccctgacccgcgccaccgacgtggacgccctcctcaccaccctggaagctcgcgccgacgaccagcgacacatcctcaccgaaggaagccccctcgccgctcaccgagccgaccccgccatctccgacgggttcgacgccgaagtgatcctcctcgacaccgaactcaccgaagaccaccgcaaccgcctcgccagcctcgtcgaggctcttccccgcgtgtcagtcgccgcggtaacaaccagccccaccagcccacacgaatggtccctcaccctgacaggtgacccactagccgccgacgtggctcccctcggctggcacatccacccccaaaccctctcccccgacctgtacaaccgcgtggttgaactactcgccaactccgccgccgcagactacgaacccgccagctggtggaaccacgacgccgacgacgagcccaccaccggccccaccaacgaggaagaatctaccccgagcaggcgagcccgcccgaatatccgcctgaccaccctgaccggcggcatcgacctatccagcgtcgacatcgacgacatcatcgacgaagccaaccaggccctcgacaacaccgacgaggccaccgaccaggttcgtgtcgacaccgaccaacccggcaccgacacccccttccccatcgacgacatcgacccgctgagctccgaccacccggtcctatccatcatcggccaccccgacatcacaggtgccactggaaccgttgggcgctccccgtggcgctgccaacagttggccctctacatcgctgagcatccgggagcatcgggggcgactatcgccgatgatttggggctatcagcgtcgacggtgcgctcgattgctacacacctgcgacactggttgggagccgacgatgccggggtggcttacatgccggcggcgacgcgcggctaccggctcgatgagcggatcgtcacagatgtggacctgatcgacgctgctgtggccggggcaggcattaacaccgctgagacggccacactggtggccattttgaagctgggccgcggacgggtcttcgctggggttcctgaatcggaacttcgccagttcagggcgtcgatgtaccacgtggaggcccgcatcgtcgatgctgccctccaagtgacagaccgggccctggaagccggggacctggggctggcccggtgggcgttgacccaagggctactggtgtctcccgatcatgaggacctggtcgccggttgtctgcgcaccgagtaccaggccggcaacatggacaaggtcgccgagctggtcgatcacctgtcggctaccgcacgccgactgggcgtcgacctcaacgaggacaccacccggatcatcgatacggtcacccacgccgacaggagagcatcatgatctcccctgcactcatctccgtcaggaaggttcctatgcaccat

SEQ ID NO: 266 - DNA, 650 bp, Propionibacterium acnes
  source 1..650: mol_type = genomic DNA
tgcgggtacacctaccagcaggcagccccggaaggcggttataaggtcaccgcaatcacgtcgtgggatgtgacctggtcggtactaggacacacgggcacagtccacatccagaaggccggtgggcagatgcttccggtcggcgagttggagtctgttgttacacggcgatgactcctgatagtccgacgctgtatgaggtgttgggggtctgccctgataccactgatgaccagatcaagacggcgtggcgtcgtgccgcgaaagtgactcaccctgatgccggtggcactagtgaggcgttcgcggccgcccggcacgcctgggaggtgttgtctgatcctgcccggcgcaccgcctacgatgccgacctggcggaggaggatgatcccgacgacgaagccgccgacgccttcgacgttgatccgttcacggcatggccctggtgcgccccgtacatcgacgccacccccaccctgcgccacacctgccccggcacgatcaaggccatcgtggtcgccatcgccgggatcatggccggaatcggctggcaggaagcgctggaggccgtggtgtcgccgccggggtttctgggggcgtgctggatagtctcagtgccggttgtcgtcgcagtgacatggctggcagcg

SEQ ID NO: 267 - DNA, 3863 bp, Propionibacterium acnes
  source 1..3863: mol_type = genomic DNA
gctgagaaaaattttgggtccgccctgcatatcggggcctcttcataccttcaaaagtgtgaaggggaatacagactcttcgactggaattaaaatggtatatggcgtgtccggtccgcacccagctccacgatgcgccataggggagccataacttcaccaatcgtatacgatatgagtgtgggtgagcatctaccggtggccgacagtcagatacaagcatgggcggatgaagcagaagctgattatgacctcagcatgcttccgccgtctcgacgtggtcgcccaccggtggggaggggcccgggcactgtggtccctgtgcgcttcgacgcggacactctcaaggcgttgtcacaacgagcccatgacgaaggattgaccacgcgttctgacgcgatccgtgctgcggttaaccagtggctcggcctcggctcgtaaacattatcggcgcgacaaccttactgatgacgctgttggttacgccgtagagcacatcttgtactcgtgggcgctcgacgatgctgatgatcctcgttgctggatgatgattcggtgttgacccagctggcctcctcatggagctagttatcctcatctacgacgatggctatgaactcctgatccacgccatgaaagcccgccctcagtatctgagctacttcgctatctagtgttgttgggcgagttgaactcaacttttctccgacgcaagcgccaataaaaggctgatccatccgaataccaccaaacacggctgaagtgtggaacagattcagcaagacagggtgcggtgctcgggtgcgttggggagatgaggatattcaggcttctggcgggatgtggcttgatgacgtccaggatcaccggttcggttttgaaggtgccttgcattaatgtcgacagggtcgtacgactcgaggattggatcgaccagcccgttgcgtctgaagaacttcatccaccccggtggagctccggccgcgtactggtgcaacggatcattagcatgggtagcgtgagtatgccttcgatcgtggtcagtgctgtcatcatccaagattctgacgggcggcttctcactgtccgtaaacgaggcaccgaggcattcatgctgccaggcggcaagccggagcccggcgaggactcgcgtcaggcagtagtccgggaagtgcacgaagagctcggcgtcgcattgtcttccgacgacctgcgtcgggtgggagtgttcaccacgcgagcagcgaatgaggccggccatcaggtggtggcgacgattttcacccacaccccggttgcggtgagtgagccagctgctgagatcgagcagattcgttggctcgattggagtgtcgacgccctgcctgacgacctggccccgctgctggtcgaggcagtcatcccgtggctgcggcgccgtatccggtcggtcgctgtattcacgggtgcgaaggatggaaccgaccctcattatcgtgtcgaagcaaccgccttgggccggggtctcgcacacgccgggatcaccctggtttatggcggcgggaaggtcgggatgatgggtgctgttgctgatgcggccctcgctgctggcggcgctgtgatcggagtgatgccgcagcacttggtggacggggagatcgcccatcctagtctgactcacctcgaggtagtgcggactatgcatgagcgcaagcagcggatgagtgacctagctgacgcgttcgtcgcgctacccggcggcggcggaacccttgacgagctattcgaagcatggacatggcagcagctcggtgtacacagcaaacccgtggccttgtacgactcgaccttctgggcaccgctgaccgcgctactcaaccacatgaccatcgaaggcttcatccgccctgaggaccgcgcctcgctcgtgatcgccgataccatacatcagctgatggccgatcttgagggatggaccccaccaccaccgaagtggcgctcgtgacatagaacaaatgattctgactatggctcattgacatctgcgcagcggctactagctccattgacttcaaatcgggccttggccgaggctcggttcaggtggcccggaatggatccccacaaattgaatgctcatgatcgaggtgatgaacgcccactctattgtcctacgcccggttgtatccagcgagcaattgaaggtgctgcgcctgttggtcgaccaggccgagccactcatcatcgacgggcgcatcttgtacgaggcatgggacaggctgcaaacagcccgtccggcccgctagaaaaaatttttagggcccgctccgcacatcccggtctgtacccacaccttcaagggtgtgaagggaataaaaacacacctaacaacaactttgtttcatgatttggcgcgtcggaccctttctgaccgatgtcgtgcgcaacaatggacccatgagttcgcctaccaagacccgccggaaggggacacgcggcccgaaacctcgcagcgacgaggagctaacggctgtgatgttccgcgtcccagagtcagtggccgaacgtgtcagcgatatggcttgggagctgaggctctcccgatccgatcttgtgggctggtcggccctctatgcactcaactcgatgctcagacagcgcggagaggacacgattccggttccggagtatctggacaaggccgtgctcgctgcgttgtatcccgatgggttgcccttcgacgaggacaacgaggagccgggcgagaatgccgggcaggaggagcttgcgatgactggatgagcccgaacatggttgaaggccgccccgccaggcgaccttcaatcaatggtttcggttgtcagctgcagccacccttgccaggtgctgtggttcttctccagaggaggagggaccgccatgaagaccaagaagacctagaagatccaaaagaaccggtttcggctgttgcttcggtcttcatggtagctgatagcccgcgtcgttggaagtgcgacgacgccgatcctcatcggtatcgcaccctgaaacagggtgttgaacatgaagggttgaccgctatgtcaagccatgagacgccctcccggagggcgtcatgaccgctttaattcaagctctgccgacagctgaactgtctgctggacctggtgctagcagtccagctagaccctctgctgagggcttcatcaagattcatcacgacctcattagtgcgggcgtgtcgggtaacgcgatggcgttgttcgtcgcgttacgtaaccagcccggctgtgatcagtggacccgtcactcgtacctgcggctagcccaatggtgcggctgggatgggctgtcggaggcggcgggctgtaagcgggtgcagcgggccgctgctgagctcgctagcggtggttggctggaatcgcgggtcggccatgatcgtcgcaccgctaagacgctggtgtggcatcggttgaccagccccgacaccgaccgctgggagcaattgccgcggattgtgtgggcgaggatctgccagatcgccggagagacgtcgggagagtgggtgaggcattggctggtgtggcggatgctggccggtcgtactggtgtggctcaggcccctacgtccatcgtggcccggttcctgggctgttcttcgcgccaggtctctcatatccgtggggctctcgttgatgccggtctgctcggctgtgacgaggtgtcgggggcggcgagccgggtgtggttcccctcgatggccgaggagtgtgcagcggatcgtgaggtggtcgatggggccgtcgtcggtgctggggtgggctctggtgaaggtgtcgaggagggcggggaacccctgtcgattttgtccacccacccctgtc

SEQ ID NO: 268 - DNA, 653 bp, Propionibacterium acnes
  source 1..653: mol_type = genomic DNA
acgtgcgggtacacctaccagcaggcagcaccagcggggggctataaggtcaccgcaatcacgtcgtgggatgtgacctggtcggtactaggacacacgggcacagtccacatccagaaggccggtgggcagatgcttccggtcggcgagttggagtctgttgttacacggcgatgactcctgatagtccgacgctgtatgaggtgttgggggtctgccctgatgccactgatgaccagatcaagacggcgtggcgtcgtgccgcgaaagtgactcaccctgatgccggtggcactagtgaggcgttcgcggccgcccggcacgcctgggaggtgttgtctgatcctgcccggcgcaccgcctacgatgccgacctggcgggggaggatgatcccgacgacgaagccgccgacgccttcgacgttgatccgttcacggcatggccctggtgcgccccgtacatcgacgccacccccaccctgcgccacacctgccccggcacgatcaaggccatcgtggtcgccatcgccgggatcatggccggaatcggctggcaggaagcgctggaggccgtggtgtcgccgccggggtttctgggggcgtgctggatagtctcagtgccggttgtcgtcgcagtgacatggctggcagcg

SEQ ID NO: 269 - DNA, 3862 bp, Propionibacterium acnes
  source 1..3862: mol_type = genomic DNA
gctgagaaaaattttgggtccgccctgcatatcggggcctcttcataccttcaaaagtgtgaagggaatacagactcttcgactggaattaaaatggtatatggcgtgtccggtccgcacccagctccacgatgcgccatagaggagccataacttcaccaatcgtatacgatatgagtgtaggtgagcatctaccggtggccgacagtcagatacaagcatgggcggatgaagcagaagctgattatgacctcagcatgcttccgccgtctcgacgtggtcgcccaccggtggggaggggcccgggcactgtggtccctgtgcgcttcgacgcggacactctcaaggcgttgtcacaacgagcccatgacgaaggattgaccacgcgttctgacgcgatccgtgctgcggttaaccagtggctcggcctcggctcgtaaacattatcggcgcgacaaccttactgatgacgctgttggttacgccgtagagcacatcttgtactcgtgggcgctcgacgatgctgatgatcctcgttgctggatgatgattcggtgttgacccagctggcctcctcatggagctagttatcctcatctacgacgatggctatgaactcctgatccacgccatgaaagcccgccctcagtatctgagctacttcgctatctagtgttgttgggcgagttgaactcaacttttctccgacgcaagcgccaataaaaggctgatccatccgaataccaccaaacacggctgaagtgtggaacagattcagcaagacagggtgcggtgctcgggtgcgttggggagatgaggatattcaggcttctggcgggatgtggcttgatgacgtccaggatcaccggttcggttttgaaggtgccttgcattaatgtcgacagggtcgtacgactcgaggattggatcgaccagcccgttgcgtctgaagaacttcatccaccccggtggagctccggccgcgtactggtgcaacggatcattagcatgggtagcgtgagtatgccttcgatcgtggtcagtgctgtcatcatccaagattctgacgggcggcttctcactgtccgtaaacgaggcaccgaggcattcatgctgccaggcggcaagccggagcccggcgaggactcgcgtcaggcagtagtccgggaagtgcacgaagagctcggcgtcgcattgtcttccgacgacctgcgtcgggtgggagtgttcaccacgcgagcagcgaatgaggccggccatcaggtggtggcgacgattttcacccacaccccggttgcggtgagtgagccagctgctgagatcgagcagattcgttggctcgattggagtgtcgacgccctgcctgacgacctggccccgctgctggtcgaggcagtcatcccgtggctgcggcgccgtatccggtcggtcgctgtattcacgggtgcgaaggatggaaccgaccctcattatcgtgtcgaagcaaccgccttgggccggggtctcgcacacgccgggatcaccctggtttatggcggcgggaaggtcgggatgatgggtgctgttgctgatgcggccctcgctgctggcggcgctgtgatcggagtgatgccgcagcacttggtggacggggagatcgcccatcctagtctgactcacctcgaggtagtgcggactatgcatgagcgcaagcagcggatgagtgacctagctgacgcgttcgtcgcgctacccggcggcggcggaacccttgacgagctattcgaagcatggacatggcagcagctcggtgtacacagcaaacccgtggccttgtacgactcgaccttctgggcaccgctgaccgcgctactcaaccacatgaccatcgaaggcttcatccgccctgaggaccgcgcctcgctcgtgaccgccgataccatacatcagctgatggccgatcttgagggatggaccccaccaccaccgaagtggcgctcgtgacatagaacaaatgattctgactatggctcattgacatctgcgcagcggctactagctccattgacttcaaatcgggccttggccgaggctcggttcaggtggcccggaatggatccccacaaattgaatgctcatgatcgaggtgatgaacgcccactctattgtcctacgcccggttgtatccagcgagcaattgaaggtgctgcgcctgttggtcgaccaggccgagccactcatcatcgacgggcgcatcttgtacgaggcatgggacaggctgcaaacagcccgtccggcccgctagaaaaaatttttagggcccgctccgcacatcccggtctgtacccacaccttcaagggtgtgaagggaataaaaacacacctaacaacaactttgtttcatgatttggcgcgtcggaccctttctgaccgatgtcgtgcgcaacaatggacccatgagttcgcctaccaagacccgccggaaggggacacgcggcccgaaacctcgcagcgacgaggagctaacggctgtgatgttccgcgtcccagagtcagtggccgaacgtgtcagcgatatggcttgggagctgaggctctcccgatccgatcttgtgggctggtcggccctctatgcactcaactcgatgctcagacagcgcggagaggacacgattccggttccggagtatctggacaaggccgtgctcgctgcgttgtatcccgatgggttgcccttcgacgaggacaacgaggagccgggcgagaatgccgggcaggaggagcttgcgatgactggatgagcccgaacatggttgaaggccgccccgccaggcgaccttcaatcaatggtttcggttgtcagctgcagccacccttgccaggtgctgtggttcttctccagaggaggagggaccgccatgaagaccaagaagacctagaagatccaaaagaaccggtttcggctgttgcttcggtcttcatggtagctgatagcccgcgtcgttggaagtgcgacgacgccgatcctcatcggtatcgcaccctgaaacagggtgttgaacatgaagggttgaccgctatgtcaagccatgagacgccctcccggagggcgtcatgacctctttaattcaagctctgccgacagctgaactgtctgctggacctggtgctagcagtccagctagaccctctgctgagggcttcatcaagattcatcacgacctcattagtgcgggcgtgtcgggtaacgcgatggcgttgttcgtcgcgttacgtaaccagcccggctgtgatcagtggacccgtcactcgtacctgcggctagcccaatggtgcggctgggatgggctgtcggaggcggcgggctgtaagcgggtgcagcgggccgctgctgagctcgctagcggtggttggctggaatcgcgggtcggccatgatcgtcgcaccgctaagacgctggtgtggcatcggttgaccagccccgacaccgaccgctgggagcaattgccgcggattgtgtgggcgaggatctgccagatcgccggggagacgtcgggagagtgggtgaggcattggctggtgtggcggatgctggccggtcgtactggtgtggctcaggcccctatgtccatcgtggctcggttcctgggctgttcttcgcgccaggtctctcatatccgtggggctctcgttgatgccggtctgctcggctgtgacgaggtgtcgggggcggcgagccgggtgtggttcccctcgatggccgaggagtgtgcagcggatcgtgaggtggttgatggggccgtcgtcgatgctggggtgggctctggtgaaggtgtcgaggagggcggggaacccctgtcgattttgtccacccacccctgtc

SEQ ID NO: 270 - DNA, 2238 bp, Propionibacterium acnes
  source 1..2238: mol_type = genomic DNA
gacgccggccaccccaactactccgacccacacggtgaccccagctccggcctctgccggccactcgaccagcgacgagcacccactccatacggataccgccgcagcggacaaggccagcaacgaggacgccctgtccccaatccaggtgggtttgaccgccagcgtcggactggtgctggtcgccggactgatcaccaccctcaaccgccgctaccggacccggttcacccgccagccccgcggcaaggccatgaccctgcccagcccggacgcccaaactgccgagatagcgctgcgcagcaccggggcgactgacactctgacgatcacctgcctcgaccaggcgctccgcgcgatcggcgcatggtgccaccactgcgggcacccgctgccacccctgctggccgcccgcgtcgatgacgaccggatcgacctgctgctatcccaggcggcccccgaccatcccgaggcggtggagctggccgccgacggatcggtgtggaccctcaccgccgaccggatcgacgacctgctagcccacaccgatgacaaccaagcggctccgtggccgtctctggtcacactgggacgcgacgacgacggcgcccacatcctcatcgacttggaagccgcaggaaccttgcacctgatcgccgatgacgaccaggtcgacgcggccctcgccgcgatcgccgtggaactggccacctgcgactggtccgacgaagtcaacgtcaccctcgtcggccaggtgtgcccgggcctagaagacgcactagagtctccgaccctgacccgcgccaccgacgtggacaccctcctcaccaccctagaagctcgcgccgacgaccagcgacacatcctcaccgaaggaaaccccctcgccgctcaccgagccgaccccgccatctccgacgggttcgacgccgaagtgatcctcctcgacaccgaactcaccgaagaccaccgcaaccgcctcgccagcctcgtcgaggctcttccccgcgtgtcagtcgccgcggtaacaaccagccccaccagcccagacgaatggtccctcaccctgacaggtgacccactagccgccgacctggctcccctcggctggcacatccacccccaaaccctctcccccgacctgtacaaccgcatggttgaactactcgccaactccgccgccgcagactacgaacccgccagctggtggaaccacgacgccgacgacgagcccaccaccgaccccaccaacgaggaagaatctaccccgagcaggcgagcccgcccgaatatccgcctgaccaccctgaccggcggcatcgacctatccagcgtcgacatcgacgacatcatcgacgaagccaaccaagccctcgacaacaccgaccagaccaccaaccaggttcgcgtcgacaccgaccaacccggcaccgacacccccttccccatcgacgacatcgacccgctgagctccgaccacccggtcctatccatcatcggccacccccacatcacaggtgccactggaaccgttgggcgctccccgtggcgctgccaacagttggccctctacatcgctgagcatccgggagcatcgggggcgactatcgccgatgatttggggctatcagcgtcgacggtgcgctcgattgctacacacctgcgacactggttgggagccgacgatgccggggtggcttacatgccggcggcgacgcgcggctaccggctcgatgagcggatcgtcacagatgtggacctgatcgacgctgctgtggccggggcaggcattaacaccgctgagacggccacactggtggccattttgaagctgggccgcggacgggtcttcgctggggttcctgactcggaacttcgccagttcagggcgtcgatgtaccacgtggaggcccgcatcgtcgatgctgccctccaagtgacagaccgggccctggaagccggagacttggggctggcccggtgggcgttgacccaagggctactggtgtctcccgatcatgaggacctggtcgccggttgtctgcgcaccgagtaccaggccggcaacatggacaaggtcgccgagctggtcgatcacctgtcggctaccgcacgccgactgggcgtcgacctcaacgaggacaccacccggatcatcgatacggtcacccacgccgacaggagagcatcatgatctcccctgcactcatctccgtcaggaaggttcctatgcaccat

SEQ ID NO: 271 - DNA, 739 bp, Propionibacterium acnes
  source 1..739: mol_type = genomic DNA
acgtgcgggtacacctaccagcaggcagcaccagcggggggctataaggtcaccgcaatcacgtcgtgggatgtgacctggtcggtactaggacacacgggcacagtccatatcgagaaggccggtgggcagatgcttccggtcggcgagttggagtctgttgttacacggcgatgactcctgatagtccgacgctgtatgaggtgttgggggtctgccctgatgccactgatgaccagatcaagacggcgtggcgtcgtgccgcgaaagtgactcaccctgatgccggtggcactagtgaggcgttcgcggccgcccggcacgcctgggaggtgttgtctgatcctgcccggcgcaccgcctacgatgccgacctggcgggggaggatgatcccgacgacgaagccgccgacgccttcgacgttgatccgttcacggcatggccctggtgcgccccgtacatcgacgccacccccaccctgcgccacacctgccccggcacgatcaaggccatcgtggtcgccatcgccgggatcatggccggaatcggctggcaggaagcgctggaggccgtggtgtcgccgccggggtttctgggggcgtgctggatagtctcagtgccggttgtcgtcgcagtgacatggctggcagcggtgacgggtctggcatttttcaccatggcggccatctggtgtggatggtcgttgataggtggtgcgttgctgtggggccagacgtc

SEQ ID NO: 272 - DNA, 3863 bp, Propionibacterium acnes
  source 1..3863: mol_type = genomic DNA
gctgagaaaaattttgggtccgccctgcatatcggggcctcttcataccttcaaaagtgtgaaggggaatacagactcttcgactggaattaaaatggtatatggcgtgtccggtccgcacccagctccacgatgcgccatagaggagccataacttcaccaatcgtatacgatatgagtgtgggtgagcatctaccggtggccgacagtcagatacaagcatgggcggatgaagcagaagctgattatgacctgagcatgcttccgccgtctcgacgtggtcgcccaccggtggggaggggcccgggcactgtggtccctgtgcgcttcgacgcggacactctcaaggcgttgtcacaacgagcccatgacgaaggattgaccacgcgttctgacgcgatccgtgctgcggttaaccagtggctcggcctcggctcgtaaacattatcggcgcgacaaccttactgatgacgctgttggttacgccgtagagcacatcttgtactcgtgggcgctcgacgatgccgatgatcctcgttgctggatgatgattcggtgttgacccagctggcctcctcatggagctagttatcctcatctacgacgatggctatgaactcctgatccacgccatgaaagcccgccctcagtatctgagctacttcgctatctagtgttgttgggcgagttgaactcaacttttctccgacgcaagcgccaataaaaggctgatccatccgaataccaccaaacacggctgaagtgtggaacagattcagcaagacagggtgcggtgctcgggtgcgttggggagatgaggatattcaggcttctggcgggatgtggcttgatgacgtccaggatcaccggttcggttttgaaggtgccttgcattaatgtcgacagggtcgtacgactcgaggactggatcgaccagcccgttgcgtctgaagaacttcatccaccccggtggagctccggccgcgtactggtgcaacggatcattagcatgggtagcgtgagtatgccttcgatcgtggtcagtgctgtcatcatccaagattctgacgggcggcttctcactgtccgtaaacgaggcaccgaggcattcatgctgccaggcggcaagccggagcccggcgaggactcgcgtcaggcagtagtccgggaagtgcacgaagagctcggcgtcgcattgtcttccgacgacctgcgtcgggtgggagtgttcaccacgcgagcagcgaatgaggccggccatcaggtggtggcgacgattttcacccacaccccggttgcggtgagtgagccagctgctgagatcgagcagattcgttggctcgattggagtgtcgacgccctgcctgacgacctggccccgctgctggtcgaggcagtcatcccgtggctgcggcgccgtatccggtcggtcgctgtattcacgggtgcgaaggatggaaccgaccctcattatcgtgtcgaagcaaccgccttgggccggggtctcgcacacgccgggatcaccctggtttatggcggcggggagggcgggatgatgggtgctgttgctgatgcggccctcgctgctggcggcgctgtgatcggagtgatgccgcagcacttggtggacggggagatcgcccatcctagtctgactcacctcgaggtagtgcggactatgcatgagcgcaagcagcggatgagtgacctagctgacgcgttcgtcgcgctacccggcggcggcggaacccttgacgagctattcgaagcatggacatggcagcagctcggtgtacacagcaaacccgtggccttgtacgactcgaccttctgggcaccgctgaccgcgctactcaaccacatgaccatcgaaggcttcatccgccctgaggaccgcgcctcgctcgtgatcgccgataccatacatcagctgatggccgatctcgagggatggaccccaccaccaccgaagtggcgctcgtgacatagaacaaatgattctgactatggctcattgacatctgcgcagcggctactagctccattgacttcaaatcgggccttggccgaggctcggttcaggtggcccggaatggatccccacaaattgaatgctcatgatcgaggtgatgaacgcccactctattgtcctacgcccggttgtatccagcgagcaattgaaggtgctgcgcctgttggtcgaccaggccgagccactcatcatcgacgggcgcatcttgtacgaggcatgggacaggctgcaaacagcccgtccggcccgctagaaaaaatttttagggcccgctccgcacatcccggtctgtacccacaccttcaagggtgtgaagggaataaaaacacacctaacaacaactttgtttcatgatttggcgcgtcggaccctttctgaccgatgtcgtgcgcaacaatggacccatgagttcgcctaccaagacccgccggaaggggacacgcggcccgaaacctcgcagcgacgaggagctaacggctgtgatgttccgcgtcccagagtcagtggccgaacgtgtcagcgatatggcttgggagctgaggctctcccgatccgatcttgtgggctggtcggccctctatgcactcaactcgatgctcagacagcgcggagaggacacgattccggttccggagtatctggacaaggccgtgctcgctgcgttgtatcccgatgggttgcccttcgacgaggacaacgaggagccgggcgagaatgccgggcaggaggagcttgcgatgactggatgagcccgaacatggttgaaggccgccccgccaggcgaccttcaatcaatggtttcggttgtcagctgcagccacccttgccaggtgctgtggttcttctccagaggaggagggaccgccatgaagaccaagaagatctagaagatccaaaagaaccggtttcggctgttgcttcggtcttcatggtagctgatagcccgcgtcgttggaagtgcgacgacgccgatcctcatcggtatcgcaccctgaaacagggtgttgaacatgaagggttgaccgctatgtcaagtcatgagacgccctcccggagggcgtcatgaccgctttaattcaagctctgccgacagctgaactgtctgctggacctggtgctagcagtccagctagaccctctgctgagggcttcatcaagattcatcacgaccttattagtgcgggcgtgtcgggtaacgcgatggcgttgttcgtcgcgttacgtaaccagcccggctgtgatcagtggacccgtcactcgtacctgcggctagcccaatggtgcggctgggatgggctgtcggaggcggcgggctgtaagcgggtgcagcgggccgctgctgagctcgctagcggtggttggctggaatcgcgggtcggccatgatcgtcgcaccgctaagacgctggtgtggcatcggttgaccagccccgacaccgaccgctgggagcaattgccgcggattgtgtgggcgaggatctgccagatcgccggggagacgtcgggagagtgggtgaggcattggctggtgtggcggatgctggccggtcgtactggtgtggctcaggcccctacgtccatcgtggctcggttcctgggctgttcttcgcgccaggtctctcatatccgtggggctctcgttgatgccggtctgctcggctgtgacgaggtctcgggggcggcgagccgggtgtggttcccctcgatggccgaggagtgtgcagcggatcgtgaggtggtcgatggggccgtcgtcggtgctggggtgggctctggtgaaggtgtcgaggagggcggggaacccctgtcgattttgtccacccacccctgtc

SEQ ID NO: 273 - DNA, 2238 bp, Propionibacterium acnes; identical to SEQ ID NO: 215
  source 1..2238: mol_type = genomic DNA

SEQ ID NO: 274 - DNA, 3865 bp, Propionibacterium acnes
  source 1..3865: mol_type = genomic DNA
gctgagaaaaattttgggtccgccctgcatatcggggcctcttcataccttcaaaagtgtgaaggggaatacagactcttcgactggaattaaaatggtatatggcgtgtccggtccgcacccagctccacgatgcgccatagaggagccataacttcaccaatcgtatacgatatgagtgtgggtgagcatctaccggtggccgacagtcagatacaagcatgggcggatgaagcagaagctgattatgacctgagcatgcttccgccgtctcgacgtggtcgcccaccggtggggaggggcccgggcactgtggtccctgtgcgcttcgacgcggacactctcaaggcgttgtcacaacgagcccatgacgaaggattgaccacgcgttctgacgcgatccgtgctgcggttaaccagtggctcggcctcggctcgtaaaaattatcggcgcgacaaccttactgatgacgctgttggttacgccgtagagcacatcttgtactcgtgggcgctcgacgatgccgatgatcctcgttgctggatgatgattcggtgttgacccagctggcctcctcatggagctagttatcctcatctacgacgatggctatgaactcctgatccacgccatgaaagcccgccctcagtatctgagctacttcgctatctagtgttgttgggcgagttgaactcaacttttctccgacgcaagcgccaataaaaggctgatccatccgaataccaccaaacacggctgaagtgtggaacagattcagcaagacagggtgcggtgctcgggtgcgttggggagatgaggatattcaggcttctggcgggatgtggcttgatgacgtccaggatcaccggttcggttttgaaggtgccttgcattaatgtcgacagggtcgtacgactcgaggactggatcgaccagcccgttgcgtctgaagaacttcatccaccccggtggagctccggccgcgtactggtgcaacggatcattagcatgggtagcgtgagtatgccttcgatcgtggtcagtgctgtcatcatccaagattctgacgggcggcttctcactgtccgtaaacgaggcaccgaggcattcatgctgccaggcggcaagccggagcccggcgaggactcgcgtcaggcagtagtccgggaagtgcacgaagagctcggcgtcgcattgtcttccgacgacctgcgtcgggtgggagtgttcaccacgcgagcagcgaatgaggccggccatcaggtggtggcgacgattttcacccacaccccggttgcggtgagtgagccagctgctgagatcgagcagattcgttggctcgattggagtgtcgacgccctgcctgacgacctggccccgctgctggtcgaggcagtcatcccgtggctgcggcgccgtatccggtcggtcgctgtattcacgggtgcgaaggatggaaccgaccctcattatcgtgtcgaagcaaccgccttgggccggggtctcgcacacgccgggatcaccctggtttatggcggcggggaggtcgggatgatgggtgctgttgctgatgcggccctcgctgctggcggcgctgtgatcggagtgatgccgcagcacttggtggacggggagatcgcccatcctagtctgactcacctcgaggtagtgcggactatgcatgagcgcaagcagcggatgagtgacctagctgacgcgttcgtcgcgctacccggcggcggcggaacccttgacgagctattcgaagcatggacatggcagcagctcggtgtacacagcaaacccgtggccttgtacgactcgaccttctgggcaccgctgaccgcgctactcaaccacatgaccatcgaaggcttcatccgccctgaggaccgcgcctcgctcgtgatcgccgataccatacatcagctgatggccgatctcgagggatggaccccaccaccaccgaagtggcgctcgtgacatagaacaaatgattctgactatggctcattgacatctgcgcagcggctactagctccattgacttcaaatcgggccttggccgaggctcggttcaggtggcccggaatggatccccacaaattgaatgctcatgatcgaggtgatgaacgcccactctattgtcctacgcccggttgtatccagcgagcaattgaaggtgctgcgcctgttggtcgaccaggccgagccactcatcatcgacgggcgcatcttgtacgaggcatgggacaggctgcaaacagcccgtccggcccgctagaaaaaatttttagggcccgctccgcacatcccggtctgtacccacaccttcaagggtgtgaagggaataaaaacacacctaacaacaactttgtttcatgatttggcgcgtcggaccctttctgaccgatgtcgtgcgcaacaatggacccatgagttcgcctaccaagacccgccggaaggggacacgcggcccgaaacctcgcagcgacgaggagctaacggctgtgatgttccgcgtcccagagtcagtggccgaacgtgtcagcgatatggctttggagctgaggctctcccgatccgatcttgtgggctggtcggccctctatgcactcaactcgatgctcagacagcgcggagaggacacgattccggttccggagtatctggacaaggccgtgctcgctgcgttgtatcccgatgggttgcccttcgacgaggacaacgaggagccgggcgagaatgccgggcaggaggagcttgcgatgactggatgagcccgaacatggttgaaggccgccccgccaggcgaccttcaatcaatggtttcggttgtcagctgcagccacccttgccaggtgctgtggttcttctccagaggaggagggaccgccatgaagaccaagaagatctagaagatccaaaagaaccggtttcggctgttgcttcggtcttcatggtagctgatagcccgcgtcgttggaagtgcgacgacgccgatcctcatcggtatcgcaccctgaaacagggtgttgaacatgaagggttgaccgctatgtcaagtcatgagacgccctcccggagggcgtcatgaccgctttaattcaagctctgccgacagctgaactgtctgctggacctggtgctagcagtccagctagaccctctgctgagggcttcatcaagattcatcacgaccttattagtgcgggcgtgtcgggtaacgcgatggcgttgttcgtcgcgttacgtaaccagcccggctgtgatcagtggacccgtcactcgtacctgcggctagcccaatggtgcggctgggatgggctgtcggaggcggcgggctgtaagcgggtgcagcgggccgctgctgagctcgctagcggtggttggctggaatcgcgggtcggccatgatcgtcgcaccgctaagacgctggtgtggcatcggttgaccagccccgacaccgaccgctgggagcaattgccgcggattgtgtgggcgaggatctgccagatcgccggggagacgtcgggagagtgggtgaggcattggctggtgtggcggatgctggccggtcgtactggtgtggctcaggcccctacgtccatcgtggctcggttcctgggctgttcttcgcgccaggtctctcatatccgtggggctctcgttgatgccggtctgctcggctgtgacgaggtctcgggggcggcgagccgggtgtggttcccctcgatggccgaggagtgtgcagcggatcgtgaggtggtcgatggggccgtcgtcggtgctggggtgggctctggtgaaggtgtcgaggagggcggggaacccctgtcgattttgtccacccacccctgtcga

SEQ ID NO: 275 - DNA, 3865 bp, Propionibacterium acnes
  source 1..3865: mol_type = genomic DNA
gctgagaaaaattttgggtccgccctgcatatcggggcctcttcataccttcaaaagtgtgaaggggaatacagactcttcgactggaattaaaatggtatatgccgtgtccggtccgcacccagctccacgatgcgccataggggagccataacttcaccaatcgtatacgatatgagtgtgggtgagcatctaccggtggccgacagtcagatacaagcatgggcggatgaagcagaagctgattatgacctcagcatgcttccgccgtctcgacgtggtcgcccaccggtggggaggggcccgggcactgtggtccctgtgcgcttcgacgcggacactctcaaggcgttgtcacaacgagcccatgacgaaggattgaccacgcgttctgacgcgatccgtgctgcggttaaccagtggctcggcctcggctcgtaaacattatcggcgcgacaaccttactgatgacgctgttggttacgccgtagagcacatcttgtactcgtgggcgctcgacgatgctgatgatcctcggtgctggatgatgattcggtgttgacccagctggcctcctcatggagctagttatcctcatctacgacgatggctatgaactcctgatccacgccatgaaagcccgccctcagtatctgagctacttcgctatctagtgttgttgggcgagttgaactcaacttttctccgacgcaagcgccaataaaaggctgatccatccgaataccaccaaacacggctgaagtgtggaacagattcagcaagacagggtgcggtgctcgggtgcgttggggagatgaggatattcaggcttctggcgggatgtggcttgatgacgtccaggatcaccggttcggttttgaaggtgccttgcattaatgtcgacagggtcgtacgactcgaggattggatcgaccagcccgttgcgtctgaagaacttcatccaccccggtggagctccggccgcgtactggtgcaacggatcattagcatgggtagcgtgagtatgccttcgatcgtggtcagtgctgtcatcatccaagattctgacgggcggcttctcactgtccgtaaacgaggcaccgaggcattcatgctgccaggcggcaagccggagcccggcgaggactcgcgtcaggcagtagtccgggaagtgcacgaagagctcggcgtcgcattgtcttccgacgacctgcgtcgggtgggagtgttcaccacgcgagcagcgaatgaggccggccatcaggtggtggcgacgattttcacccacaccccggttgcggtgagtgagccagctgctgagatcgagcagattcgttggctcgattggagtgtcgacgccctgcctgacgacctggccccgctgctggtcgaggcagtcatcccgtggctgcggcgccgtatccggtcggtcgctgtattcacgggtgcgaaggatggaaccgaccctcattatcgtgtcgaagcaaccgccttgggccggggtctcgcacacgccgggatcaccctggtttatggcggcgggaaggtcgggatgatgggtgctgttgctgatgcggccctcgctgctggcggcgctgtgatcggagtgatgccgcagcacttggtggacggggagatcgcccatcctagtctgactcacctcgaggtagtgcggactatgcatgagcgcaagcagcggatgagtgacctagctgacgcgttcgtcgcgctacccggcggcggcggaacccttgacgagctattcgaagcatggacatggcagcagctcggtgtacacagcaaacccgtggccttgtacgactcgaccttctgggcaccgctgaccgcgctactcaaccacatgaccatcgaaggcttcatccgccctgaggaccgcgcctcgctcgtgatcgccgataccatacatcagctgatggccgatcttgagggatggaccccaccaccaccgaagtggcgctcgtgacatagaacaaatgattctgactatggctcattgacatctgcgcagcggctactagctccattgacttcaaatcgggccttggccgaggctcggttcaggtggcccggaatggatccccacaaattgaatgctcatgatcgaggtgatgaacgcccactctattgtcctacgcccggttgtatccagcgagcaattgaaggtgctgcgcctgttggtcgaccaggccgagccactcatcatcgacgggcgcatcttgtacgaggcatgggacaggctgcaaacagcccgtccggcccgctagaaaaaatttttagggcccgctccgcacatcccggtctgtacccacaccttcaagggtgtgaagggaataaaaacacgcctaacaacaactttgtttcatgatttggcgcgtcggaccctttctgaccgatgtcgtgcgcaacaatggacccatgagttcgcctaccaagatgcgccggaagggaacacgcggcccgaaacctcgcagcgacgaggagctaacggctgtgatgtgccgcatcccagagtcagtggccgaacgtgtcagcgatatggcttgggagctgaggctctcccgatccgatcttgtgggctggtcggccctctatgcactcaactcgatgctcagacagcgcggagaggacacgattccggttccggagtatctggacaaggccgtgctcactgcgttgtatcccgatgggttgcccttcgacgaggacaacgaggagccgggcgagaatgccgggcaggaggagcttgcgatgactggatgagcccgaacatggttgaaggccgccccgccaggcgaccttcaatcaatggtttcggttgtcagctgcagccacccttgccaggtgctgtggttcttctccagaggaggagggaccgccatgaagaccaagaagacctagaagatccaaaagaaccggtttcagcttttgcttcggtcttcatggtagctgatagcccgcgtcgttggaagtgcgacgacgccgatcctcatcggtatcgcaccctgaaacagggtgttgaacatgaagggttgaccgctatgtcaagccatgagacgccctcccggagggcgtcatgaccgctttaattcaagctctgccgacagctgaactgtctgctggacctggtgctagcagtccagctagaccctctgctgagggcttcatcaagattcatcacgacctcattagtgcgggcgtgtcggggaacgcgatggcgttgttcgtcgcgttacgtaaccagcccggctgtgatcagtggacccgtcactcgtacctgcggctagcccaatggtgcggctgggatgggctgtcggaggcggcgggctgtaagcgggtgcagcgggccgctgctgagctcgctagcggtggttggctggaatcgcgggtcggccatgatcgtcgcaccgctaagacgctggtgtggcatcggttgaccagccccgacaccgaccgctgggagcaattgccgcggattgtgtgggcgaggatctgccagatcgccggggagacgtcgggagagtgggtgaggcattggctggtgtggcggatgctggccggtcgtactggtgtggctcaggcccctacgaccatcgtggcccggttcctgggctgttcttcgcgccaggtctcccatatccgtggggctctcgttgatgccggtctgctcggctgtgacgaggtgtcgggggcggcgagccgggtgtggttcccctcgatggccgaggagtgtgcagcggatcgtgaggtggtcgatggggccgtcgtcgatgctgaggtgggctctggtgaaggtgtcgaggagggcggggaacccctgtcgattttgtccacccacccctgtcga

SEQ ID NO: 276 - DNA, 2889 bp, Propionibacterium acnes
  source 1..2889: mol_type = genomic DNA
aggcgagcccgccctagtatccgcctgaccaccctgaccggcggcatcgacctatccagcgtcgacatcgacgacatcatcgacgaagccaaccaggccctcgacaacaccgacgaggccaccgaccaggttcgtgtcgacgccgaccaacccggcaccgacacccccttccccatcgacgacatcgacccgctgagctccgaccatccggtcctatccatcatcggccaccccgacatcacaggtgccactggaaccgttgggcgctccccgtggcgctgccaacagttggctctctacatcgctgagcatccgggagcatcgggggcgactatcgccgatgatttggggctatcagcgtcgacggtgcgctcgattgctacacacctgcgacactggttgggagccgacgatgccggggtggcttacatgccggcggcgacgcgcggctaccggctcgatgagcggatcgtcacagatgtggacttgatcgacgctgctgtggccggggcaggcattaacaccgctgagacggccacactggtggccattttgaagctgggccgcggacgggtcttcgctggggttcctgactcggaacttcgccagttcagggcgtcgatgtaccacgtggaggcccgcatcgtcgatgctgccctccaagtgacagaccgggccctggaagccggggacctggggctggcccggtgggcgttgacccaagggctactggtgtctcccgatcatgaggacctggtcgccggttgtctgcgcaccgagtaccaggccggcaacatggacaaggtatccgaactggtcgatcacctgtcggctaccgcacgacgcctgggcgtcgatttgagcgccgacaccacccggatcatcgactccgttattacccatacacgcaggagagcatcatgatctcttctgcactcagctctgtcaggaaggttcctatgcaccattatcgtcttggtatcggcactgccctcatcgcggtagcagccgtggccggctgtcgctcaacagactcgacacccacaccacctccatcccgtgtctccgccacgacatcagcgagctctaccctcagcccgaccccgtcagccggagcgatcagtgccgccgacgccgaaaacatctaccgcaccgtccaagctaacaagatcgcactgtacaaaaagggtggcctggcacccggggaacccgcacccgcgacactgtcgaactacgccaccggccaggctctcaccgactacatgacctacatgcaccaaatctcggggcagggcatcaaaatcacatcggggaactcctcggttaccgcggtgcgggagaaaaagggtgataccacctaccccgaagccgctatcgccttggaatcgtgcgaagacgacagttcgattcgtaccgtggaccgccacggaaaggctgatcatggacgcattttccatgtcgacagttggtatgcccgcgataagaagggcaccgtcaagatgatcgcattcaactcaacggaggtccccacatgcgacgtcaagtaatcaccgcggccgtactgggcctggccctggccaccacctccctgcccgccctcgcaggcggcggcgacttgaacggcagtgtggacacggatggtcctggttacgatgtgcgtactgaggtggattaccatcacaccaccggtggtgcgggtgggggtgccacgacagggggccatcatgggggcaaaacccacggtgatggtgaaggtgaggctattgatgggcgttctcgcgccgatgccgaagccgaactagacgaagccgaccgtaaccaggacttgacttgtgatgtcttgctcccaccggcgccgaataccccagccggccaggaatgggcgaaagaatgcaatcccccagcgaaaaaggggcagaaggccaccccgaagcccgatccggtgttagtgggccgtcacgcggccttgcagctcacccttcccggcgcggcccctcgtatcgatccgtcccccgaccttaaccggtggcactcggcagcagtgggccaggctttgtggttgtcggttgatgaccccaccgccactacgcagaaatcgatcacgtttatgggccaggttgtctctttgagcgccaaacgtaacggtttgtcgtttgatatgggtgatggtcatgtcgtgcactgtgatgccacgacgacatggacggagtcggtggaaccggggaccccctcacccacgtgcggttacacctaccaacaggcagccccggccgggggctataaggtcaccgcgatcacttcgtgggatgtgacctggtcggtactaggacacacgggcacagtgcatgttgagaaagccggtgggcagatgcttccggtcggcgagttggagtcagttgtcacccgccgatgaaccccgatagccccaccctctacgaggtattgggggttacccccgacgccaccgacacccagctcaagacggcatggcgcactgctgcgaaagcgacccaccccgatgccggcggcgacccccaggcgttcacggccgcccggcacgcctgggaggtgttgtctgatcctgcccggcgcaccgcctacgatgccgacctggcgggggaggatgatcccgacgacgaagccgccgacgccttcgacgttgatccgttcacggcatggccctggtgcgccccgtacatcgacgccacccccaccctgcgccacacctgccccggcacgatcaaggccatcgtggtcgccatcgccgggatcatggccggaatcggctggcaggaagcgctggaggccgtggtgtcgccgccggggtttctgggggcgtgctggatagtctcagtgccggttgtcgtcgcagtgacatggctggcagcg

SEQ ID NO: 277 - DNA, 1224 bp, Propionibacterium acnes
  source 1..1224: mol_type = genomic DNA
gacgccggccaccccaactactccgacccacacggtgaccccagctccggcctctgccggccactcgaccagcgacgagcacccaatccatacggataccgccacagcggacaaggccagcgacgaggacgccctgtccccaatccaggtgggtttgaccgccagcgtcggactggtgctggtcgccggactgatcaccaccctcaaccgccgctaccggacccggttcacccgccagccccgcggcaaggccatgaccctgcccagcccggacgcccaaactgccgagatagcgctgcgcagcaccggggcgactgacactctgacgatcacctgcctcgaccaggcgctccgcgcgatcggcgcatggtgccaccactgcgggcacccgctgccacccctgctggccgcccgcgtcgatgacgaccggatcgacctgctgctatcccaggcggcccccgaccatcccgaggcggtggagctggccgccgacggatcggtgtggaccctcaccgctgaccggatcgacgacctgctagcccacaccgatgacaaccaagcggctccgtggccgtctctggtcacactgggacgcgacgacgacggcgcccacatcctcatcgacttggaagccgcaggaaccttgcacctgatcgccgatgacgaccaggtcgacgcggccctcgccgcgatcgccgtggaactggccacctgtgactggtccgacgaagtcaacgtcaccctcgtcggccaggtgtgcccgggcctagaagacgcactagagtctccgaccctgacccgcgccaccgacgtcgacgccctcctcaccaccctagaagctcgcgccgacgaccagcgacacatcctcaccgaaggaaaccccctcgccgctcaccgagccgaccccgccatctccgacgggttcgacgccgaagtgatcctcctcgacaccgaactcaccgaagaccaccgcaaccgcctcgccagcctcgtcgaggctcttccccgggtgtcggtggccgcggtaacaaccagccccaccagcccagacgaatggtccctcaccctgacaggtgacccactagccgccgacgtggctcccctcggctggcacatccacccccaaaccctctcccccgacctgtacaaccgcgtggttgaactactcgccaactccgcagccgcagactacgaacccgccgactggtgggaccatgacgccga

SEQ ID NO: 278 - DNA, 3861 bp, Propionibacterium acnes
  source 1..3861: mol_type = genomic DNA
gctgagaaaaattttgggtccgccctgcatatcggggcctcttcataccttcaaaagtgtgaagggaatacagactcttcgactggaattaaaatggtatatggcgtgtccggtccgcacccagctccacgatgcgccatagaggagccataacttcaccaatcgtatacgatatgagtgtaggtgagcatctaccggtggccgacagtcagatacaagcatgggcggatgaagcagaagctgattatgacctcagcatgcttccgccgtctcgacgtggtcgcccaccggtggggaggggcccgggcactgtggtccctgtgcgcttcgacgcggacactctcaaggcgttgtcacaacgagcccatgacgaaggattgaccacgcgttctgacgcgatccgtgctgcggttaaccagtggctcggcctcggctcgtaaacattatcggcgcgacaaccttactgatgacgctgttggttacgccgtagagcacatcttgtactcgtgggcgctcgacgatgccgatgatcctcgttgctggatgatgattcggtgttgacccagctggcctcctcatggagctagttatcctcatctacgacgatggctatgaactcctgatccacgccatgaaagcccgccctcagtatctgagctacttcgctatctagtgttgttgggcgagttgaactcaacttttctccgacgcaagcgccaataaaaggctgatccatccgaataccaccaaacacggctgaagtgtggaacagattcagcaagacagggtgcggtgctcgggtgcgttggggagatgaggatattcaggcttctggcgggatgtggcttgatgacgtccaggatcaccggttcggttttgaaggtgccttgcattaatgtcgacagggtcgtacgactcgaggattggatcgaccagcccgttgcgtctgaagaacttcatccaccccggtggagctccggccgcgtactggtgcaacggatcattagcatgggtagcgtgagtatgccttcgatcgtggtcagtgctgtcatcatccaagattctgacgggcggcttctcactatccgtaaacgaggcaccgaggcattcatgctgccaggcggcaagccggagcccggcgaggactcgcgtcaggcagtagtccgggaagtgcacgaagagctcggcgtcgcattgtcttccgacgacctgcgtcgggtgggagtgttcaccacgcgagcagcgaatgaggccggccatcaggtggtggcgacgattttcacccacaccccggttgcggtgagtgagccagctgctgagatcgagcagattcgttggctcgattggagtgtcgacgccctgcctgacgacctggccccgctgctggtcgaggcagtcatcccgtggctgcggcgccgtatccggtcggtcgctgtattcacgggtgcgaaggatggaaccgaccctcattatcgtgtcgaagcaaccgccttgggccggggtctcgcacacgccgggatcaccctggtttatggcggcgggaagggcggggtgatgggtgctgttgctgatgcggccctcgctgctggcggcgctgtgatcggagtgatgccgcagcacttggtggacggggagatcgcccatcctagtctgactcacctcgaggtagtgcggactatgcatgagcgcaagcagcggatgagtgacctagctgacgcgttcgtcgcgctacccggcggcggcggaacccttgacgagctattcgaagcatggacatggcagcagctcggtgtacacagcaaacccgtggccttgtacgactcgaccttctgggcaccgctgaccgcgctactcaaccacatgaccatcgaaggcttcatccgccctgaggaccgcgcctcgctcgtgatcgccgataccatacatcagctgatggccgatcttgagggatggaccccaccaccaccgaagtggcgctcgtgacatagaacaaatgattctgactatggctcattgacatctgcgcagcggctactagctccattgacttcaaatcgggccttggccgaggctcggttcaggtggcccggaatggatccccacaaattgaatgctcatgatcgaggtgatgaacgcccactctattgtcctacgcccggttgtatccagcgagcaattgaaggtgctgcgcctgttggtcgaccaggccgagccactcactattgacgggaaagtcctgttcgagacctgggacgggctgcaggcagcccgtcctcacagctgagaaaaaattttggggccgttccgcacatcccggtctgtacccacaccttcaagggtgtgaagggaataaaaacacacctaacaacaactttgtttcatgatttggcgcgtcggaccctttctgaccgatgtcgtgcgcaacaatggacccatgagttcgcctaccaagatgcgccggaagggaacacgcggcccgaaacctcgcagcgacgaggagctaacggctgtgatgtgccgcatcccagagtcagtggccgaacgtgtcagcgatatggcttgggagctgaggctctcccgatccgatcttgtgggctggtcggccctctatgcactcaactcgatgctcagacagcgcggagaggacacgattccggttccggagtatctggacaaggccgtgctcactgcgttgtatcccgatgggttgcccttcgacgaggacaacgaggagccgggcgagaatgccgggcaggaggagcttgcgatgactggatgagcccgaacatggttgaaggccgccccgccaggcgaccttcaatcaatggtttcggttgtcagctgcagccacccttgccaggtgctgtggttcttctccagaggaggagggaccgccatgaagaccaagaagacctagaagatccaaaagaaccggtttcagcttttgcttcggtcttcatggtagctgatagcccgcgtcattggaagtgcgacgacgccgatcctcatcggtatcgcaccctgaaacagggtgttgaacatgaagggttgaccgctatgtcaagccatgagacgccctcccggagggcgtcatgaccgctttaattcaagctctgccgacagctgaactgtctgctggacctggtgctagcagtccagctagaccctctgctgagggcttcatcaagattcatcacgacctcattagtgcgggcgtgtcgggtaacgcgatggcgttgttcgtcgcgttacgtaaccagcccggctgtgatcagtggacccgtcactcgtacctgcggctagcccaatggtgcggctgggatgggctgtcggaggcggcgggctgtaagcgggtgcagcgggccgctgctgagctcgctagcggtggttggctggaatcgcgggtcggccatgatcgtcgcaccgctaagacgctggtgtggcatcggttgaccagccccgacaccgaccgctgggagcaattgccgcggattgtgtgggcgaggatctgccagatcgccggggagacgtcgggagagtgggtgaggcattggctggtgtggcggatgctggccggtcgtactggtgtggctcaggcccctacgtccatcgtggcccggttcctgggctgttcttcgcgccaggtctctcatatccgtggggctctcgttgatgccggtctgctcggctgtgacgaggtgtcgggggcggcgagccgggtgtggttcccctcgatggccgaggagtgtgcagcggatcgtgaggtggtcgatggggccgtcgtcggtgctgaggtgggctctggtgaaggtgtcgaggagggcggggaacccctgtcgattttgtccacccacccctgtc

SEQ ID NO: 279 - DNA, 3714 bp, Propionibacterium acnes
  source 1..3714: mol_type = genomic DNA
cgattttgtccacccacccctgtcgattttgtccgccaagtattagacaaaccattagacagtgaattagaccctgggtcgcgtcagcgtgttagctcaccaacgcgcgcgcgcgcggcggccgagccgccgaagccaaagaaacccataccaccaacgcctgaaccagcagcccccgcttcagacagtcctgtgtcagcgcacgctgatgaggctgccgagttggcgtggcggttcgtggggtggtgtcctcagctggtaggggcaccgaagaaggtgcgtggccagctccgtcagctggtcgctgccgagatccgccggaatccgggctggctggatgcgccagcgttggaggttgttgcccagcgggtacgtgctgaaggtgcgctgggggtccagcactgcgagattgtgcgagccgagctgcacggggtgatcgccgaccagaaggccgcccccgcccgccccgacgccctgcacgcgcgggagcccaagtggtgggacgacgtgtactacgaaggaaacacaaccgtgtggtacgactctgacgaaaccagtgacgacgacgaggcgtggaaccggtcgcaggtatgtcatgttgctgagcgtgacgacatggctggcgggattgctaccaacctgctggcctcccacgctgatgatccgatggcctggctgactcgccgtcaaaccatgctgatggctcgtttcccccacgcccagaacgaggtcatcgcgatgtgccacatcgtgcgcaccgccctggaggccgacatggccgccggaacccggtgggaggactgatgagggtctcccggcgcgccctcatggccgtggcccgtgccgacgctgccgcagcagaccatgccaccggccgatgggtggccacagccaacgccaccgtcgcccggctgaccggactgtgcgaacgcaccgtccaatacgcccgcgccaccctggtccacctgggcctgtgccgcgtcgtggccaccggccgctacctcaccgccgacgagcggcgcacggctgctcgcacccatggcggccgccagatgcgcgccgcctccacccgcgtcctcaccatgtcctgcgcaatcgtttgcgccctaccccgaaggggtcaccactacaggaaagttaagttcctagatggtcaccaacgcacgcgcaggcgcgtgcgaaggccagcaacaccagagaagaaacccctgtggctgcaaaaactcgcagccctcctcgaccagcacctgccctggctggtgagaaaccatcacatcggccgactgtgccacgccctcaccgccctgggcatcgacgaacactggcaacccgcagacctcgacgccctcctcgacgccatgaaccgcaggaaccgtcgcctcggcctcgacgtgccatgcgccgacgaccagcacaaccccttgggactgttcatccaccaggcccgagacaccctcacccacgacaacccccatgaacgccgcctggcccgcgaacaccaccgcgcccaactcatcgacgaccaactccgccgccgcgcagaaaccgccacctgcgcagcccgcctcgcagccgagcacgccgaccccgactaccagacccgccgtcgtgaacgcagggaaaccctgcgagccacactcagggccgcccagcagcatgtcaggacacactgatacccgctcatacacacaccatgaaacacgacaagccacctgacagtatcagctgcaagacgcatgacaacatagaaggacatgatgaaatacacatagacacaaccccgcacagcagtttcgcaacaaatcatgatagtctcatggcagtatcgcttgatacacacatagcatcactcccacataggcagttatgctgatatactcctactaggttatccgtccaacatgctgagtgggttcctgtacagcatgaaaggagcatggcatgatatgggccgttctcaactgcaagggtggtgtcggcaagacgaccagtgccctcctgctggcggcagccgccgccaagcagggccacaccaccctggtggccgacgctgacccccagggcaccgcatcccagtggtcagccctggcaaccaaaaacgacgaacccctgcccttcccggtgcaagcggtcaacatcgccaccatggaggcactgcccaccaccgacgcccatgatctcatcctcgttgacacacccccctcggcaggcgatctgatgttccaggcatgccgcatcgccgacctcatcatcatccccaccgccacctccggacccgacatctcccgaacatgggtcaccatggacgccacacaaggcacaccacgcgcgatcctcctcacccaaaccgaacacaaccgtgtcgtctaccgccaagctcgcactgccctcgccgccgacgacaccgtcgttctcctggaccacgacatcccccgccgtgaatccatccgcacagcatggggcaccaaccccccagacgacgtcatcacctactacctgcccgtcctcaacgaactcatggaggccctgtcatgaccaccaagaaaaccgacccattcgcccgccagaaagcagcagaagaccgcgcccaccaactccaagacgaagcccaacgccacgcccaccccaaacgcgtcatcggccccaccgcacgattccagttcgtcctgccagccgacgtgctcaccggcctcaaacacctcgccctcacccgcggcaccaccgcccgccaactcaccctcgacgccctcgacaccgcctacggcctcgacaccctcgccaacagcgggaagaaaacccacccatgacccgtgggtccccctgccaccaccccctcgacggcaactgtgtgcgagccacaggcccgcacacaggcggcagcccagtgccgtccccgccaggaaaggaactgaacttttctggagtgctggctccctatcaccccttatggtgctatcagatccagtagcgccagcccgagaggaaacccatgagctacatcgtccgcaccggaaatctagccggcacccccgagctgcgcgaggggtagccgacacggcggaccgtgcccctgacagtaagcggcactactggagacatcaccatgaccgctcagatcctcgccccgtgcaaccagaaggctgccgtcatcgaaggagccctgccatgaaccaacctaccccccacaaggccgacgagtcacagacgagcaacaccacgaggaagtggcggcacaaggtgtcgttctaccaagacccggccgacaccgaccgagtccgcggagcgatcctccacaccatgacaaccgaaggcaaccggaacctgagccagttcgtcaacgatgccgtcatggccaaggtgaccgaactggaagcaaaatacaaccacggcgagccattccccgccgtgggagcccgaggactccccccagggcggcgcagtcgccaacagataagagggcggggaccaccaatagcagtcgatttcggatctagatcgggtagacaggacccatgatgaatttcatatcctccctgctctcggccatcctgaccctctttgcgatggtagccgtggcgataggagtggtgaacattgtgccgggaatatgcgccatcatcggtgcacggaaatacggcgaccaggaccgtgtgcgggcaggacaacgaaagatccttcttggtgctatcgccttggtggtagcagtaggcattc

SEQ ID NO: 280 - DNA, 3907 bp, Propionibacterium acnes
  source 1..3907: mol_type = genomic DNA
ttggtattggtaggcgatggtgtcaccggttttgttgcggatgacgtcgaagccttcgatgtcggaggggatgtcgtcggcgtcgtagacgacggtggtggtgacggggttggaggccgacatttggccgatggtcacgcgcagcatgtttttcaacgcggaggtgaggattgtcgtggcggtggggttcttgtctgcccagcgtttctcggcgatgtcgatcatgtcttggatggttttgacccatcctcggatgggatcgactttggtcagtttgatccctccaaggaactcgatgggcttagtaacgggcccgtcaggaccgaattcggtgtcccagccttcgtcgatggctagtttcagttcggcggcgtcaacccatgtttcgtgggtggtgccgggcacgttgggccaaaaccatcctgctcgtcctttggtgcgtttgaccggtagtaggccgatgtcgtcccaccaggatggcacggtgaagcggatgtggtagcgggccgggtgccaggggttgttggtgaacaggtcgtgagcttcggtggcgctgagcagagtggcgggtgcggcaccgatctctccggtcactgatccggcatacatgaatcggccgtcgatgtacacgaagttagggatagggccggcaggcacggtggggcgccaaccttgttcgcggtcctcggggttgccgtcgtcgacgcatagttcgtagcggtgctgaggggaggtgtgttggatgagtgcgcccagttcggggtccatcggctccatgcgataggactcgggggtccgtagcttccagaggttgattccttctgctccggggcggtccatgagggcccagtcgcggtcgattctggtggcgatgatgtgggttaattcgcgccatgcccagcgggcctggattggggtgagggtctggccagggaaccattcatcagcgaccagaatgtcgaggttgcggtcggtttctttgtgggtgaaccggcctcgggcgggccgcccggacagcatgaacaggccccgcacgtgccagtcctggttgaactcgcgggtgtgagcgggggtgtcaggcagcagccaggattgaggctggtcggggatgttaccgcagacgatcaggcgtcgggcgttgtggtgtagcgcggttgttagcaggtctgacagggtcgcgtgcttggtgcgccgcccccctagcactggcaggatctcgtttccggccgcgtcgactccccgggcggtgtcgatgtctagccacactgtttcggggtcggggggccgatgtggggcgggacggcgctgctcctggtcgtctctcatggtttcctcctttgggccagggagcggccggcgtcgagggcgttcatgcgctcgcgttgttcttcgcgtagttggtagacccggcctcgtgacactcctgctgcctcggcgatggtggtggccggcaggtggccgatggcggcagcgtcggcaaggacgtcacgccaggccaggtcaatggttcccagctgggctagagcttcgtcgcggcggcgggtggcatcagccactacggaggcccaccctgtggggtggatggtcttgacgacgattcggttgtggcggatggggccccatgcatcagcggggacttgccagccgtgattggcggcggactcggtgatcttgaggcgtcgctcaggtgcgcgggtgcgggcagtgacgtcggtgttccaggtctggactggtacccacgtcccctctcggatgcgttcgatgacgcacgtggtgacctcgtcggtgactgtgatgaccagacgataatctttcccgtctggggtggttcggtagctgggcatgtcaccctcccctatctgtcaaatgagctagacacagtgtctatttaatttgacgcaaagtcaagtgcattagacgcctttgtgtggatccgccccaccagacaaacactcgcgcctcatgacccgccgcgaagccttaacgaaaccaaaccgcttatagaaccgctccgcagcgctccccgagggctttagctccaaggtaagaccttgctcgtcggcccattggcagacttgtgtgaggatctgtgagccgtagccctgatttcggggggcggcatgcacgcacatcagcatgtgaccatgacggcgggtcggcgggctgacataagccccaccacgccagtccggtgtgatctgccaacttcgccatgccgcagcgcgccagcggcgggcctcggtagccaccatgatcaccatgatgatggacagggttacgacgccgactatggtcagctcactccagccaggccagttcccggagatgatccagcctcccagcgcccagatgatcatggcttccacgcccgccgcaatcgggacgagtggggcagtacggatgcggcctgccatgatctcggtgatctcgctgcgatgccatgacaaggagaattcccacgactcttgaatcatgctgatgtgtgaacggcttcctcggcttcgccctgccatagcttctctagacggcgctcggctagctcgtcggggcacggcgacagcctgccgcactcggagcagaccccgaagtggcgcgagagagtgatgaccggctcatcgggagcatgaaccgattcaacgaccgggtgctgctcatcggtgagtcctgaggcgtgaccaatctcggctagacggaggtgaaccataccgtcgtagtagtcgaggccttcaacgtggaacgggtaggagccgtccgcggtgtggcctgcaaccaggtccccgacttccagctgactggcggtcatggttcgcaccggcggcagcggggtccgggtcgcgttgatcctcatggtctctccttgcttctgcgccttcatagatgaaggtgccacagccggggttgatgtgcggaaccacagccactttttcaataaatccatcaccacggtctcaccccttcccaaatgtgtaaaccgtggtttacgctttaaggcatgatcgaacacacaccgacacccgccgcgcctcgcgtggccatcatttcccctagcgggccaccacggttcttggccgagcctcccagcgccgcgctgcgacgccatggtcggacccgcatgaggtcccttcccctatcccctcacattcgcgcctgggtctccaccagcggccgcaaacccaatcccgtgactactgctttgatctggatgcacaccggggccctgcttttggtgtgggacatcgccgttttgaccggccccgccctcggccactgcgtatgccctctcagtaatagcgccgagctgactgcccggcgctggctcgaccaggtcgccgacaatcccggcttcctcaacacccttaccgaggctgcccgcatcaccgatgaatggcgtcacgcaacgcctccgcacattcaagccccttaccggacccttcatcagtgaacggaggtcatgcatgactagcaatattgaatggggccacaatcccgacggccgcgccgaggctcctctttaccgagcctgggccaagatgctcgtgcgcgcctccgggctaccctggcgtatcgtcgccgccctagccgggatctcccctacttccatgcaccaacttctgttcggccgcaacggtcgacccgtggaatggatcggctccgatgatgctcgcgccctgatggatatcggcatcgatgatctcgcctcagcgtccaccgaccgtatcccggcccgcgaatcccgcgagctgttggtagccctgcacaccctcggctggaccgatgagcatctaagccgctggctgaccagttccgacctcgacctgaccaccgcccccaaagccctctacgtcactcgactatccgccgcccgcatccaggccacttacgacctgctcgtcagccaacccgtccg

SEQ ID NO: 281 - DNA, 2174 bp, Propionibacterium acnes
  source 1..2174: mol_type = genomic DNA
ccccaatgcccccacaacgatcagcacaccaacagcgatcatcaggtgggcagcactaactgatcccaacgaaccaagatcaaacaagccctgcccgggagcgccgagcagtccgtgggcgcgaagccatgctccgagattgccaataatcttggggaccatcttgttcagtagggctatccctccgatgccgacaacgaggaagacgaggatttcttcgcctgcgttgtttcttcctgtgtttgcggtcatgctgccttctcggggtggatggccagccagctgatgaggttgtcggtgatctgccctgagatttggatcagttcgtcttgcccggcctgccatgcccgcgatgtgccggccagcaatgatgctgggacccctactgcgcggccacgggatgcaacctcagccaaggcggcgcgtaactcctcgacggtgctttcgatgtaccaactgccgtcagtactagtctcagcggcatcggtggtagcgataagagcatcggtgaggtcgtcgacggcgcggtccagatcagcgatgtccggtagggctacaggagtcatggtgtgtcttccttctagggtgccttcactggtgaagggtccctagccccggccgatgtgcggtgctgtgggaaaaatgcttcccattggtccgtcttagttaggaaacttggcctaagtgctgtcgagggtcgcgtgttcgtgaccggttcgaagacactgccgccttgccttcttgcccgtggcgcttccgagatggggtcagtgggcgatggctaggccgacgagggcgccgctgcacaggctgggtgcccaggggaggaatcgggtggtgtggtgtcggaaccggtcgattagggcatatagggcgatcagggtgaggccggctatgacagtgacctggatcgtgtcgatgccggttgctgcggccggggctgcccacagtggtgtgatgcgcacgtcggagaagccgaagccgcctcgggagatgagccaggcgatcatccacgccgcggagatgacgacagtagcgatagcagcacgtatcgccgcagtatggtccgagagggcggtaacgactacagccccgatccatccggcccatccggtccacgctaggactgccggtatccatgtggtgatggcgtcaatgacggcaacccatgccccgatggtggctagcagggcccacgtcggccacgtgggtgctggggcccatgctgtggcggtgatcatggtgagtgctgctgcgctacagaccgcgatcaagcttcggaggctgtaggtgtcgcggtaggcgatcttgtcgggattggcggtgggtggttcgggcaggatgtgggtgagggcaggccatcctgcgaccgcaatagccgcgacggcgaccacccacacgatctgttgcatgggtctcatcatggcccatcatcgatgagtatgggtggccgacatggggtcactcgtagaggggatcgaggggtgtgcgggcgagcatggcttcctgtgtgccgagcatgagggtgccagagtcgtcgccggccgattcccagtcgacgatgatctgcccgctgtcgaagctggattcggtgatggtcacccattctccgtcgatattgatgagcaccccagcggccagctctgtggcagcaaccgggtgaggtgggttgtagaagcggtcgatgtcgcgggcagggtcgtcgggttcttcggttacctcgggtggggtcgatctggctgtctcggtgtcgtcggccaggtcggctcccaggatgcgttcccattcggggctggttttcttgcccgctgaggccatcgtctcgtcgatctgttcgtcagtgggccacacaaatttctttttggtccaggtcgtggtgtcgggtcgcagctgatccagcagttccaggtcttgcggggagtgggccttgcgggggtcgggggtgtagaagaattggacttccttaggggctgattcgccggataggtaggtgccgcggccgcgtttgccgaacgggattcccacgccgacgtgttcggagccgaacatcatgcgggctccgtcagcagacaggggtccggtggcggcacgcccggagaagttgtctcggatttcgccgcccaggaactcggcgtcggggcgttgggtccccagatcgacgtggatacggcagg

SEQ ID NO: 282 - DNA, 1677 bp, Propionibacterium acnes
  source 1..1677: mol_type = genomic DNA
ccccctcttctgggtggtggtccggggcgtcaccgccccggaccagttgggtagtcatctcagttgaaataagcgattagtgatacgcccctcatgctttccggtgctgtcatgagcgtctgacaacagcgacacctcggggcagccgacggacagtcctctggctgccgctctgatcccatgcccacggcacgaaggtgtcggacagctcggtctcgtcatgtgcccaaatagcgtcgtgggcctgtcgccaagcttctcgggagccccacacgggcacgaccgggccacaccggtgtcctggtctccagtgtcgcgacactgtcgatttcggtacgtgcaatgcggcggcggtttgacggatcgacatcccagactcccgcgcgtcccagatcgccatgtggagagtatttgcctccagtgcggccgccacacttgcacgctctcgcgcacgctcgaatgcccgcctagtgctctcaaatgtcgtcacgacgcctccccctgaaaatactcagggtgtcccacggtgggacaccctgagtatttcataccccaactcgcctcaccacacgtcgacctcgacaccgatcaagcgacccgtatcagcgacattgccgtaccgctgccccgcctggtcctccagccacgacaacgcatcccgaaacagcccgacgtcttccaaagctaaaccacagtcgtagccgcccttgtcccccaaccgcacaatctggcgctcccggtggcctccctcgtcgacctcgatccacagtttcgcgtgcatccgctggcctcggccctctgacaggatctcggtgagcaggtcggacgcctgccctcgcgcatcctcgttactgcgggggaattggagtatgtgggaggaacggtggtggggcaggtttgtgacctcgtgacgcagcaggttgcgcttgtgcatctgccgttcgagacgctcgggctgacctgttgacggggttgagccgtggcgccgcttcctcggcggggtctcgatccgttgctcttccggcggttcggcgtcaggttgtggtgcgcgatctcccctaggacgggggggctcgccacctatatccgagggacgatgagacggccttccacgcttgctgcgcactttcgcagcccgccccttgcggtcacatcgacgcggcggcggagtgacgtcctcaccgcgcgctaactgcgtcaacgccgccaccaggttggtgcccggtttcagccctttcagcacgaaccgcaccaggcgggggtctcggccgattcgtcgggcaatctcggcttggctccacccttcggctaacagggtgcgcaacaagtcttgggcccggttatcacgctcagtcactggtcgcctcctcggggagtcctgcctgctcggcctgctctgatagagcagcccgttccgatccggtctggggcgctttcaggggaccgggtaggacacctttgacacgcagtcgcccgtccttgccgtcgtcgccgcccccctgggccacagggagcgcccgggggggcacgttgctggtgtagatggcgtcgccgtggatagccagcagggtgcgggagttcatgcgtagtgctcctcccttggttgtggcgttttttccggtggtggggtcggcgatgggtgtgttgagggtgcgtacgcgggacagggcccagata

SEQ ID NO: 283 - DNA, 3558 bp, Propionibacterium acnes
  source 1..3558: mol_type = genomic DNA
aaccgtcatctggcgtggagtagcgagctgatgcaggaaggcaatttgtacggccttcccgaggaagacccgttgtggggcgaggccgtggagctggtagcgggacttatcccctctgtgcgggcgatgtggtcgcacgatgggcagaccgtgactgtgtcggctggccggcgggtggcgacactggggatgccgatgcggggatggcgtggtatcgagatgcgcggctggaatccagtgggcgccgatacgtggtggatcgttgaccaggtgggtagttggctggtcgatcaggatgagccgatggtcgttgacgggagggtgctccatgaggcgtgggaacggtcgcagatggtccgttcaggccgctgagaaaaaatttaggtccgccctgcatatcggggcctcttcataccttcaaaagtgtgaagggaatacagactcttcgactggaattaaaatggtatatggcgtgtccggtccgcacccagctccacgatgcgccataggggagccataacttcaccaatcgtatacgatatgagtgtaggtgagcatctaccggtggccgacagtcagatacaagcatgggcggatgaagcagaagctgattatgacctcagcatgcttccgccgtctcgacgtggtcgcccaccggtggggaggggcccgggcactgtggtccctgtgcgcttcgacgcggacactctcaaggcgttgtcacaacgagcccctgacgaaggattgaccacgcgttctgacgcgatccgtgctgcggttaaccagtggctcggcctcggctcgtaaacattatcggcgcgacaaccttactgatgacgctgttggttacgccgtagagcacatcttgtactcgtgggcgctcgacgatgctgatgatcctcgttgctggatgatgattcggtgttgacccagctggcctcctcatggagctagttatcctcatctacgacgatggctatgaactcctgatccacgccatgaaagcccgccctcagtatctgagctacttcgctatctagtgttgttgggcgagttgaactcaacttttctccgacgcaagcgccaataaaaggctgatccatccgaataccaccaaacacggctgacgtgtggaacagattcagcaagacagggtgcggtgctcgggtgcgttggggagatgaggatattcaggcttctggcgggatgtggcttgatgacgtccaggatcaccggttcggttttgaaggtgccttgcattaatgtcgacagggtcgtacgactcgaggactggatcgaccagcccgttgcgtctgaagaacttcatccaccccggtggagctccggccgcgtactggtgcaacggatcattagcatgggtagcgtgagtatgccttcgatcgtggtcagtgctgtcatcatccaaggttctgacgggcggcttctcactgtccgtaaacgaggcaccgaggcattcatgctgccaggcggcaagccggagcccggcgaggactcgcgtcaggcagtagtccgggaagtgcacgaagagctcggcgtcgcattgtcttccgacgacctgcgtcgggtgggagtgttcaccacgcgagcagcgaatgaggccggccatcaggtggtggcgacgattttcacccacaccccggttgcggtgagtgagccagctgctgagatcgagcagattcgttggctcgattggagtgtcgacgccctgcctgatgacctggccccgctgctggtcgaggcagtcatcccgtggctgcggcgccgtatccggtcggtcgctgtattcacgggtgcgaaggatggaaccgaccctcattatcgtgtcgaagcaaccgccttgggccggggtctcgcacacgccgggatcaccctggtttatggcggcgggaaggtcgggatgatgggtgctgttgctgatgcggccctcgctgctggcggcgctgtgatcggagtgatgccgcagcacttggtggacggggagatcgcccatcctagtctgactcacctcgaggtagtgcggactatgcatgagcgcaagcagcggatgagtgacctagctgacgcgttcgtcgcgctacccggcggcggcggaacccttgacgagctattcgaagcatggacatggcagcagctcggtgtacacagcaaacccgtggccttgtacgactcgaccttctgggcaccgctgaccgcgctactcaaccacatgaccatcgaaggcttcatccgccctgaggaccgcgcctcgctcgtgatcgccgataccatacatcagctgatggccgatcttgagggatggaccccaccaccaccgaagtggcgctcgtgacatagaacaaatgattctgactatggctcattgacatctgcgcagcggctactagctccattgacttcaaatcgggccttggccgaggctcggttcaggtggcccggaatggatccccacaaattgaatgctcatgatcgaggtgatgaacgcccactctattgtcctacgcccggttgtatccagcgagcaattgaaggtgctgcgcctgttggtcgaccaggccgagccactcatcatcgacgggcgcatcttgtacgaggcatgggacaggctgcaaacagcccgtccggcccgctagaaaaaatttttagggcccgctccgcacatcccggtctgtacccacaccttcaagggtgtgaagggaataaaaacacacctaacaacaactttgtttcatgatttggcgcgtcggaccctttctgaccgatgtcgtgcgcaacaatggacccatgagttcgcctaccaagatgcgccggaaggggacacgcggcccgaaacctcgcagcgacgaggagctaacggctgtgatgttccgcgtcccagagtcagtggccgaacgtgtcagcgatatggcttgggagctgaggctctcccgatccgatcttgtgggctggtcggccctctatgcactcaactcgatgctcagacagcgcggagaggacacgattccggttccggagtatctggacaaggccgtgctcgctgcgttgtatcccgatgggttgcccttcgacgaggacaccgaggagccgggcgagaatgccgggcaggaggagcttgcgatgactggatgagcccgaacatggttgaaggccgccccgccaggcgaccttcaatcaatggtttcggttgtcagctgcagccacccttgccaggtgctgtggttcttctccagaggaggagggaccgccatgaagacccagaagacctagaagatccaaaagaaccggtttcggctgttgcttcggtcttcatggtagctgatagcccgcgtcgttggaagtgcgacgacgccgatcctcatcggtatcgcaccctgttccagggtcgagaatgtgaaggattaacaaccatgacaagtcatgagacgccctcccggagggcgtcatgaccgctttaattcaagctctgccgacagctgaactgtctgctggacctggtgctagcagtccagctagaccctctgctgagggcttcatcaagat

SEQ ID NO: 284 - DNA, 3282 bp, Propionibacterium acnes
  source 1..3282: mol_type = genomic DNA
gagccagttatcctcatctacgacgatggctatgaactcctgatccacgccatgaaagcccgccctcagtatctgagctacttcgctatctagtgttgttgggcgagttgaactcaacttttctccgacgcaagcgccaataaaaggctgatccatccgaataccaccaaacacggctgaagtgtggaacagattcagcaagacagggtgcggtgctcgggtgcgttggggagatgaggatattcaggcttctggcgggatgtggcttgatgacgtccaggatcaccggttcggttttgaaggtgccttgcattaatgtcgacagggtcgtacgactcgaggattggatcgaccagcccgttgcgtctgaagaacttcatccaccccggtggagctccggccgcgtactggtgcaacggatcattagcatgggtagcgtgagtatgccttcgatcgtggtcagtgctgtcatcatccaagattctgacgggcggcttctcactgtccgtaaacgaggcgccgaggcattcatgctgccaggcggcaagccggagcccggcgaggactcgcgtcaggcagtagtccgggaagtgcacgaagagctcggcgtcgcattgtcttccgacgacctgcgtcgggtgggagtgttcaccacgcgagcagcgaatgaggccggccatcaggtggtggcgacgattttcacccacaccccggttgcggtgagtgagccagctgctgagatcgagcagattcgttggctcgattggagtgtcgacgccctgcctgatgacctggccccgctgctggtcgaggcagtcatcccgtggctgcggcgccgtatccggtcggtcgctgtattcacgggtgcgaaggatggaaccgaccctcattatcgtgtcgaagcaaccgccttgggccggggtctcgcacacgccgggatcaccctggtttatggcggcgggaaggtcggggtgatgggtgctgttgctgatgcggccctcgctgctggcggcgctgtgatcggagtgatgccgcagcacttggtggacggggagatcgcccatcctagtctgactcacctcgaggtagtgcggactatgcatgagcgcaagcagcggatgagtgacctagctgacgcgttcgtcgcgctacccggcggcggcggaacccttgacgagctattcgaagcatggacatggcagcagctcggtgtacacagcaaacccgtggccttgtacgactcgaccttctgggcaccgctgaccgcgctactcaaccacatgaccatcgaaggcttcatccgccctgaggaccgcgcctcgctcgtgatcgccgataccatacatcagctgatggccgatcttgagggatggaccccaccaccaccgaagtggcgctcgtgacatagaacaaatgattctgactatggctcattgacatctgcgcagcggctactagctccattgacttcaaatcgggccttggccgaggctcggttcaggtggcccggaatggatccccacaaattgaatgctcatgatcgaggtgatgaacgcccactctattgtcctacgcccggttgtatccagcgagcaattgaaggtgctgcgcctgttggtcgaccaggccgagccactcatcatcgacgggcgcatcttgtacgaggcatgggacaggctgcaaacagcccgtccggcccgctagaaaaaatttttagggcccgctccgcacatcccggtctgtacccacaccttcaagggtgtgaagggaataaaaacacacctaacaacaactttgtttcatgatttggcgcgtcggaccctttctgaccgatgtcgtgcgcaacaatggacccatgagttcgcctaccaagacccgccggaaggggacacgcggcccgaaacctcgcagcgacgaggagctaacggctgtgatgttccgcgtcccagagtcagtggccgaacgtgtcagcgatatggcttgggagctgaggctctcccgatccgatcttgtgggctggtcggccctctatgcactcaactcgatgctcagacagcgcggagaggacacgattccggttccggagtatctggacaaggccgtgctcgctgcgttgtatcccgatgggttgcccttcgacgaggacaacgaggagccgggcgagaatgccgggcaggaggagcttgcgatgactggatgagcccgaacatggttgaaggccgccccgccaggcgaccttcaatcaatggtttcggttgtcagctgcagccacccttgccaggtgctgtggttcttctccagaggaggagggaccgccatgaagaccaagaagacctagaagatccaaaagaaccggtttcggctgttgcttcggtcttcatggtagctgatagcccgcgtcgttggaagtgcgacgacgccgatcctcatcggtatcgcaccctgaaacagggtgttgaacatgaagggttgaccgctatgtcaagccatgagacgccctcccggagggcgtcatgaccgctttaattcaagctctgccgacagctgaactgtctgctggacctggtgctagcagtccagctagaccctctgctgagggcttcatcaagattcatcacgacctcattagtgcgggcgtgtcgggtaacgcgatggcgttgttcgtcgcgttacgtaaccagcccggctgtgatcagtggacccgtcactcgtacctgcggctagcccaatggtgcggctgggatgggctgtcggaggcggcgggctgtaagcgggtgcagcgggccgctgctgagctcgctagcggtggttggctggaatcgcgggtcggccatgatcgtcgcaccgctaagacgctggtgtggcatcggttgaccagccccgacaccgaccgctgggagcaattgccgcggattgtgtgggcgaggatctgccagatcgccggagagacgtcgggagagtgggtgaggcattggctggtgtggcggatgctggccggtcgtactggtgtggctcaggcccctacgaccatcgtggcccggttcctgggctgttcttcgcgccaggtctcccatatccgtggggctctcgttgatgccggtctgctcggctgtgacgaggtgtcgggggcggcgagccgggtgtggttcccctcgatggccgaggagtgtgcagcggatcgtgaggtggtcgatggggccgtcgtcgatgctgaggtgggctctggtgaaggtgtcgaggagggcggggaacccctgtcgattttgtccacccacccctgtc

SEQ ID NO: 285 - DNA, 3093 bp, Propionibacterium acnes
  source 1..3093: mol_type = genomic DNA
gtcgagaatggccttgaggacgagggcttggattgtggtgtcattctgggctgccttgaccttcagtccaacgccgatgtcccgggggattctggtctgcaacttgaacaggtctgcctccttggttttgaacagtttggttgcagggttggcaacgggctgttcttggcgctggcgtccaaggttgcttttctttcgggcggtcatgacatcatctccaacagttcgtcggcaacatcggcgaagaaggcgatagtttccggctcaggggtacagccgtaggcgcgcttgatgacttgacgcttggggatgacgtgatcgaccaactgcgtctgggagtcgttggctagaaggtcgcgaccttccttgaacagggaggtattcggttcagctttggaaagcagcaccacgcgcggggttcctgcggcggcgtcgtgcgtctcccaggtgcgcgccatgtcgagcccggacgtgtcggtggggatgataaccagatcggcggcgcgaatggcggcggtgatgatgtcaccgttgcccggcggggtgtcaatgatgacaacttcttcgggtccggcgacgaggtgctggagcgtcgccttgttggccggttccacggggaaccccaaggggtcggcgttactcagtgtgcactcggcccaggatgatgctgacccttgagggtcggcatctttgacgcggaccatacggcccgtctcatggagagctgcagccagcaggatcgctgccgtggtcttaccgacgccacccttggcgttgataatgctccagatcatggtgacacctttcagtgaggatgcatatcagtttacctgcaaggagtaaagacggcaagcagttatgccgtttctgcggcaagccgtcttgcatccttggatgtatagatagttgtctacttatggttgtggatcgtggtgtctcgtaccaggatttagtgtgctcgctgatatgcacgactttcgggcggcctgatctggcggtggtgccactaacccaggagtctgatccgcaaggtgtcctcgactttgaggaaggggtctctgctttcgtgttgacctaaagtcaacggccctgggcgatcactgaatcctaatatctttgtatccttccctgattgcatcttagcatccttgaattcaaacagggatggagccatgctgttttgacgacatggatgcactggggtttggttgttgccgatgcggagcgtcaggcggcccgggacgccgccaccgccgacacgctgcgggagatcgtgggactgctgggccggggcggcgaggtcccgcccgccaagacggggcgtaagacgaccggcaggccggccccggcccgcaagtcgtcggccacgcagtaaaggcagggatccgtccctacgcagagagcggaggcagatcctgggggatccgactcttcggttccgtgatcttcccggagatcttcccggatcccccagggctcatcctgatacggggtccgccgacggaccccgtatcagtgggggcgctgccaccagtgatggcgggcgggtcggtcggcgtctaggccccgcccgatggtcgcctggtctacctcgcaggcccgtgctgttgccgaggccgagaacgtctgcccacttgttgccgattcagtcccctctccgtctgccatgtcgccaacctttcctatctggcgtgctcatggacatgcccgggcacgccctcgctgctcagaggcctgctcgttccacctctggccgcgaaccgtatttctgctgaccactcctcgtgcgtgaatatttgccagccttggccattcatatttggactactctgcaccagatatcggactgggaaacctcttgcacatctctaattgtcatctattcgttgggcgcgcgctgttagatcgtgatcataccaatcagaagacaaagcgacgcccttttgagcggcttttcgaacgattctagaccgcgctatatcagcatttctaccgcgcggccagagtgctacactaaattcctctctgcaatccttaagtccattctttacttcctcatccaatttctgcgacagcatttttatggaagcatcgcactctgactcatcatcaaatgcctcaattgcgtgcgttcgccattcacggcgcgtattatcgtagccgtaatgaagtattacccaccgatccacagaatcatcgttaggatctacaactgtcatgaatggcccaactctcgcgctggtgtattctcaattgcagttcagtgactttacttgaccagtcccggatttagtagacgtagacggagagtaccccgccgggaacttgactgacatcactgctgtaccgtactgctttcccgggtggcaaccatcgtaagcagcatttgccgtgacgtacctagtgctctttctctgagtgccggtaatcgccttatatggtacaggtgggtgaatcgtagccgttacggataccgatgacacgtttgcatcacatgaagctgtggcgacataattagttgtcccattgacatgatgagagtcgtggacatactgtcgaggatcgagagtgcaggttattgttgacgccgttgttctggtaccagctgctttcgagctctttgttgcagttacagtctgcggccctgaaggttttactgacgcgactgatgtgttcgcgtgttttgcggcagtgctttgatttggttgtgcttgtgtagcagttgctgatgtcgccagtgatgcccccattaccatagctgtgattatggcgtagtctttacgcttcattgcgcccccaaataagcatgttagtttgctattttgaataggatacgagacatcgccatgacttgtcaagggaagaagtaaaaagaatcgggggggtatcaagaaagatgtgctttcatcaggacgaaagcggatgggtccgttcgacttggtgacgaatgatccggccttgcgtcgcggagaccaggccggcgagtttgtcgagcagggccgccgtggcctcatcgtcgggcacatcactaaagggacgaacaaccatgacggctagggccagaaacgaccggaactgaatcgcatgtggacc

SEQ ID NO: 286 - DNA, 2920 bp, Propionibacterium acnes
  source 1..2920: mol_type = genomic DNA
acccttccagcccagcaccacccactacaccgacacgatccacgaagctgaaaccgaacctcccatccccgtccgaaacatcaacgaactcatcaaccccaccaaccatgcatgaacgcacgatcgcctaccggccagccttcctgcgcgacgtgaagcggctcaaaaacaagcactacaacatgaacacacactcaaatgggcggtaaggtcacgaagtcgacgtggctgcctcacggatggcttcggcgagctcttggggtcgactccacatgggccagtggccggttggcagatccatcgcggtgaagttggtcaggtgcgcgacggcgctgaacatcggattgcctgctgcggccagctcgaggacctggacgctgggaatggagcagcagatcaacgtggttagtacatcatggcgagcgctattggacagcgcgacccgtgcccgggccacttgcgcgggttcaggaaccgcccgtgcccggaaccggtcaaggtgctcgttgctgaggccctctaaactggcctgcttgccgagagtatcgaagtcaggaagtggcagctcagctgtttcctcaggtagatctggtgcgaaggcacctccatcgctcatgggaccggagtccacccagacgatccgatggaccaactctgggtgcctgtctacaactaggctcaccggcccgttcgcgccactgtgtcccaccaggaccgcatcgccgcccatctcgtccaggatggctgagatggcgtcagcttggtcgtcgagcgtgcgcgtagtgcgctgggtgtcctccggatcgagacctggcagcgtcagccccacggctcgactgccagcagtgttcaataactcgactacctcgtcccaagcccaggctccgagccagtaaccaggaacgaggacgataggccgatgctggtcaggtcgcgatgttgaagtcatggagacatagttgcacagtgcgcggacaagggagtggcactatttctggcatgaatttagatctgggtgtccggtgaggcgatcagaacgcctccatgtactgtccgagtgtctaggatgcagcggacacagtcgagcagctggctcacaagtttccaggtgtccttctgcccctatgagggaagtcggctgctctcgcaacctttgagggctgctctggggtcggaaccagttacagatcgttcaagttccgggaactaccgccggtcacgctgattgattcccgggcgatctcgcttctgacgacagtggtcggtgaccgagaggagtcctactctgaccccgctgctgcggtgagtaaatcacgggcgtcccggatccggccacccgtccaagtgccagccagcttgatcggctaggcatcgtcaaggagcgacgatgaggtgatgatgcgatgtgagcgcaccgcgaagtgaggtataaagaagccttcccgggcgcatgcgtcgcccaggaaggccaggttggcccctggacggctgaatggttgggcggatcaggctgtagcggagacgtgcagtacctcgtaggcgatggcgttggttgggctctggtctgcatcgtggctactgagttcgacgaggatgacggtccaggtggtgatgtcgacggcggtgacgcgggcgatggtggaatcagtggatgctgcaaggaagtcggcggttatgtcttcgatgcagtgggacggagcagtgctggtgggcaggggcacggtcttgacggtcaggcttcgggcagcagagtaatcggcggttccgttaacaagctggtggacggtccagtcctggatcgggtgccggccgaagtcgcgtacgatagccgagtaaccaagttcgccccagcagaactggcgcatcccctctatgtcgcgccagacgtagaagggcgcgtaggagttctggggtgcgcctttgaccttttcttggatgaggtaggccttgaactccagtccatggtagccgtccatgaggtgtccagtctggatgacgcggtcgcggatgatctgcatgtcatagtcggtgggcagggtgatctgatattgcatggcgtacatcagcggttctccttggtttcgtgggagtaggtcgtgggggtgacgggttcctgccaatcgatggttgacaagtcgtcggcggcttgttggtaggtaaggtggatcattggctgtttgagtgcagcgccatgccagtgtctctggccggcgtcgatccagatggattcgcccttggtcaggtgctggggtgcttgtccttcaatatggaccagggcaacgccgcccgtgacgtagaggccctgtcccttggggtgtgtgtgcctcagcggcaaacgtgacggcgtgggcggcacgcccggcgtcttccgtggcacgatcggccggatccatggcggcgcgcagctgctgttctgcagccaggcgtccaggtcacggcgggcagcatcgacacccagggcagcctcgacggcttcagggctacgacgctggccgggctggttgaccgcagaccactggtgccgggcgtcgtccagatcatggccggcggcgtcgatgagggcggtggtggcttcggcgcagcatcgcctgatccactccgaacgtgacaggccagctgtctcggcggcactgtcaatgcgcgccaggagagatttcatgggcgctcatctgtagcctccagataggcgttgatgtagcgcagagcctgatccgtcatgtcgatggcggctgcctcggcagacgacacaacgggctgtggatgataagaccacccaacatagacggcgaacatcaatttctcgacagctttcatgaggtccccggcggcaaccgcatccgcctcatcatccgaggagaaccacttcaggtctgaacggctgtacatagcccctaggtcctgatgtgggtcgaggtccttg

SEQ ID NO: 287 - DNA, 2918 bp, Propionibacterium acnes
  source 1..2918: mol_type = genomic DNA
acccttccagcccagcaccacccactacaccgacacgatccacgaagctgaaaccgaacctcccatccccgtccgaaacatcaacgaactcatcaaccccaccaaccatgcatgaacgcacgatcgcctaccggccagccttcctgcgcgacgtgaagcggctcaaaaacaagcactacaacatgaacacacactcaaatgggcggtaaggtcacgaagtcgacgtggctgcctcacggatggcttcggcgagctcttggggtcgactccacatgggccagtggccggttggcagatccatcgcggtgaagttggtcaggtgcgcgacggcgctgaacatcggattgcctgctgcggccagctcgaggacctggacgctgggaatggagcagcagatcaacgtggttagtacatcatggcgagcgctattggacagcgcgacccgtgcccgggccacttgcgcgggttcaggaaccgcccgtgcccggaaccggtcaaggtgctcgttgctgaggccctctaaactggcctgcttgccgagagtatcgaagtcaggaagtggcagctcagctgtttcctcaggtagatctggtgcgaaggcacctccatcgctcatgggaccggagtccacccagacgatccgatggaccaactctgggtgcctgtctacaactaggctcaccggcccgttcgcgccactgtgtcccaccaggaccgcatcgccgcccatctcgtccaggatggctgagatggcgtcagcttggtcgtcgagcgtgcgcgtagtgcgctgggtgtcctccggatcgagacctggcagcgtcagccccacggctcgactgccagcagtgttcaataactcgactacctcgtcccaagcccaggctccgagccagtaaccaggaacgaggacgataggccgatgctggtcaggtcgcgatgttgaagtcatggagacatagttgcacagtgcgcggacaagggagtggcactatttctggcatgaatttagatctgggtgtccggtgaggcgatcagaacgcctccatgtactgtccgagtgtctaggatgcagcggacacagtcgagcagctggctcacaagtttccaggtgtccttctgcccctatgagggaagtcggctgctctcgcaacctttgagggctgctctggggtcggaaccagttacagatcgttcaagttccgggaactaccgccggtcacgctgattgattcccgggcgatctcgcttctgacgacagtggtcggtgaccgagaggagtcctactctgaccccgctgctgcggtgagtaaatcacgggcgtcccggatccggccacccgtccaagtgccagccagcttgatcggctaggcatcgtcaaggagcgacgatgaggtgatgatgcgatgtgagcgcaccgcgaagtgaggtataaagaagccttcccgggcgcatgcgtcgcccaggaaggccaggttggcccctggacggctgaatggttgggcggatcaggctgtagcggagacgtgcagtacctcgtaggcgatggcgttggttgggctctggtctgcatcgtggctactgagttcgacgaggatgacggtccaggtggtgatgtcgacggcggtgacgcgggcgatggtggaatcagtggatgctgcaaggaagtcggcggttatgtcttcgatgcagtgggacggagcagtgctggtgggcaggggcacggtcttgacggtcaggcttcgggcagcagagtaatcggcggttccgttaacaagctggtggacggtccagtcctggatcgggtgccggccgaagtcgcgtacgatagccgagtaaccaagttcgccccagcagaactggcgcatcccctctatgtcgcgccagacgtagaagggcgcgtaggagttctggggtgcgcctttgaccttttcttggatgaggtaggccttgaactccagtccatggtagccgtccatgaggtgtccagtctggatgacgcggtcgcggatgatctgcatgtcatagtcggtgggcagggtgatctgatattgcatggcgtacatcagcggttctccttggtttcgtgggagtaggtcgtgggggtgacgggttcctgccaatcgatggttgacaagtcgtcggcggcttgttggtaggtaaggtggatcattggctgtttgagtgcagcgccatgccagtgtctctggccggcgtcgatccagatggattcgcccttggtcaggtgctggggtgcttgtccttcaatatggaccagggcaacgccgcccgtgacgtagaggccctgtcccttggggtgtgtgtgcctcagcggcaaacgtgacggcgtgggcggcacgcccggcgtcttccgtggcacgatcggccggatccatggcggcgcgcagctgctgttctgcagccaggcgtccaggtcacggcgggcagcatcgacacccagggcagcctcgacggcttcagggctacgacgctggccgggctggttgaccgcagaccactggtgccgggcgtcgtccagatcatggccggcggcgtcgatgagggcggtggtggcttcggcgcagcatcgcctgatccactccgaacgtgacaggccagctgtctcggcggcactgtcaatgcgcgccaggagagatttcatgggcgctcatctgtagcctccagataggcgttgatgtagcgcagagcctgatccgtcatgtcgatggcggctgcctcggcagacgacacaacgggctgtggatgataagaccacccaacatagacggcgaacatcaatttctcgacagctttcatgaggtccccggcggcaaccgcatccgcctcatcatccgaggagaaccacttcaggtctgaacggctgtacatagcccctaggtcctgatgtgggtcgaggtcct

SEQ ID NO: 288 - DNA, 2920 bp, Propionibacterium acnes
  source 1..2920: mol_type = genomic DNA
acccttccagcccagcaccacccactacaccgacacgatccacgaagctgaaaccgaacctcccatccccgtccgaaacatcaacgaactcatcaaccccaccaaccatgcatgaacgcacgatcgcctaccggccagccttcctgcgcgacgtgaagcggctcaaaaacaagcactacaacatgaacacacactcaaatgggcggtaaggtcacgaagtcgacgtggctgcctcacggatggcttcggcgagctcttggggtcgactccacatgggccagtggccggttggcagatccatcgcggtgaagttggtcaggtgcgcgacggcgctgaacatcggattgcctgctgcggccagctcgaggacctggacgctgggaatggagcagcagatcaacgtggttagtacatcatggcgagcgctattggacagcgcgacccgtgcccgggccacttgcgcgggttcaggaaccgcccgtgcccggaaccggtcaaggtgctcgttgctgaggccctctaaactggcctgcttgccgagagtatcgaagtcaggaagtggcagctcagctgtttcctcaggtagatctggtgcgaaggcacctccatcgctcatgggaccggagtccacccagacgatccgatggaccaactctgggtgcctgtctacaactaggctcaccggcccgttcgcgccactgtgtcccaccaggaccgcatcgccgcccatctcgtccaggatggctgagatggcgtcagcttggtcgtcgagcgtgcgcgtagtgcgctgggtgtcctccggatcgagacctggcagcgtcagccccacggctcgactgccagcagtgttcaataactcgactacctcgtcccaagcccaggctccgagccagtaaccaggaacgaggacgataggccgatgctggtcaggtcgcgatgttgaagtcatggagacatagttgcacagtgcgcggacgagggagtggcactatttctggcatgaatttagatctgggtgtccggtgaggcgatcagaacgcctccatgtactgtccgagtgtctaggatgcagcggacacagtcgagcagctggctcacaagtttccaggtgtccttctgcccctatgagggaagtcggctgctctcgcaacctttgagggctgctctggggtcggaaccagttacagatcgttcaagttccgggaactaccgccggtcacgctgattgattcccgggcgatctcgcttctgacgacagtggtcggtgaccgagaggagtcctactctgaccccgctgctgcggtgagtaaatcacgggcgtcccggatccggccacccgtccaagtgccagccagcttgatcggctaggcatcgtcaaggagcgacgatgaggtgatgatgcgatgtgagcgcaccgcgaagtgaggtataaagaagccttcccgggcgcatgcgtcgcccaggaaggccaggttggcccctggacggctgaatggttgggcggatcaggctgtagcggagacgtgcagtacctcgtaggcgatggcgttggttgggctctggtctgcatcgtggctactgagttcgacgaggatgacggtccaggtggtgatgtcgacggcggtgacgcgggcgatggtggaatcagtggatgctgcaaggaagtcggcggttatgtcttcgatgcagtgggacggagcagtgctggtgggcaggggcacggtcttgacggtcaggcttcgggcagcagagtaatcggcggttccgttaacaagctggtggacggtccagtcctggatcgggtgccggccgaagtcgcgtacgatagccgagtaaccaagttcgccccagcagaactggcgcatcccctctatgtcgcgccagacgtagaagggcgcgtaggagttctggggtgcgcctttgaccttttcttggatgaggtaggccttgaactccagtccatggtagccgtccatgaggtgtccagtctggatgacgcggtcgcggatgatctgcatgtcatagtcggtgggcagggtgatctgatattgcatggcgtacatcagcggttctccttggtttcgtgggagtaggtcgtgggggtgacgggttcctgccaatcgatggttgacaagtcgtcggcggcttgttggtaggtaaggtggatcattggctgtttgagtgcagcgccatgccagtgtctctggccggcgtcgatccagatggattcgcccttggtcaggtgctggggtgcttgtccttcaatatggaccagggcaacgccgcccgtgacgtagaggccctgtcccttggggtgtgtgtgcctcagcggcaaacgtgacggcgtgggcggcacgcccggcgtcttccgtggcacgatcggccggatccatggcggcgcgcagctgctgttctgcagccaggcgtccaggtcacggcgggcagcatcgacacccagggcagcctcgacggcttcagggctacgacgctggccgggctggttgaccgcagaccactggtgccgggcgtcgtccagatcatggccggcggcgtcgatgagggcggtggtggcttcggcgcagcatcgcctgatccactccgaacgtgacaggccagctgtctcggcggcactgtcaatgcgcgccaggagagatttcatgggcgctcatctgtagcctccagataggcgttgatgtagcgcagagcctgatccgtcatgtcgatggcggctgcctcggcagacgacacaacgggctgtggatgataagaccacccaacatagacggcgaacatcaatttctcgacagctttcatgaggtccccggcggcaaccgcatccgcctcatcatccgaggagaaccacttcaggtctgaacggctgtacatagcccctaggtcctgatgtgggtcgaggtccttg

SEQ ID NO: 289 - DNA, 3086 bp, Propionibacterium acnes
  source 1..3086: mol_type = genomic DNA
ggttacccactcccgctcatcggagttgtcggtggcaataatgcgcccgccccgggccgcgatggctgcgcacagccgcttctcggccatcgtcttgcccgcgcccatcttgccgatgaacgccaccgtgttgcctttctgatcctgagtgtcggcatgcaaatcgaggtaggccagcgactgcaacggggagcctgtgaccacagccaacgggatgccggtggtacggcccaaccggtactcaaccaccgggatagatgcggcgaacgcggaggcgtgagtcagctgacggtaggcgttaagcgaggaggagaaccggccaccgggccgggcagcccacagcaagtcctcctgacggcccacgggacgcacccacgtgaagtcaccgaacaccggatcattgacgaacgctcctgccagctcctcggtggtctcaaagtcaggagacgagacagtgacggtgataagagcctggatctcgacctcacgctcatcggcggccagctcggcgttgtagtcgacgagcacctgagcggaatgctcgatagacatgagggtcgaagcctgggtcatctcaccgccctcaacattgtcgagctgatcgacggtttggcggatggcccgctgatttttctgcatcgcagcgtgacgggtccgggccactccccggatcgccacgtcgaccggcacgccagtgtcgtcgatacggcccaggaactcgtaggcaggccacgtcatcgtgcggggcaccttacccagcacgatatgggactggtagacggtctcgccggtgtcggcaccgattttgaggacgcgacgattccacgcctgagccgtccgggacatgtgggagactcgcttgtcatcctcgctggccagcaggtcggaggtcgcggcctcatcgatgaccaactcccccagcgcggcacgtccaacctcatccatgagggcgattccctcgccaggggcatcatcacgcaaccgggtcgggtggcctgacaggtgctgccgaagccagatctgttcatcaacggtgaccgggcggggttggaacgctgccggcagtttcgcaccgaattccttagcctgacggagggcccactcccgtgcgacacggccaggagcggtggtcatgagtccggcagcttcggtgattttgttgagggcggcggtccaggcggtgtgggtgcgtattttctggtcttggttgagtttgatcgataggaaccacacgcgccggcctagggatgcggtttcaggctggtcgagggtggcgtcgatttcgtcggcccacacggggtgttcgctcaggtcgaggccggcggccatggcgtcgacgatttctgtggggtcggtccaggtgagggccccgttgaggcagaactcgtggcgggcgaggtggcggaataggtcgcggtgagctgcggcgacggtgagggaggcgttctcggtgacgggtcgctggaggggagtaagtcgccaagtggcccagatgtcgccggtggaggtccagacgaggttgtcgaagaggaaccgttcggggatggacatcatgactccttttcggcggcggcgaggaaggcttccaggccgctgcggcgtacagcgttcccggtagggtgcaggggttttctgggggtgggttcagatttcgaatgtgggaagagtttgtggatggtatcggtgtcctcggcgagggcttggtcgagcaggcaggtggccggggtgtcggtcatctcgtccagctcgtcgatcatctcgtcgaggaggttgggggtggtggatgcggcccacacaggtgggatagccggtgcgggtcgaggcggtgtggggaggcggagtttggtttggccccagaggggtgtgtgggtcatgccggcgggagtggtggcggcgtgagtggtcacacgccaccagcccgacagccatgccagaggtgaccaggtccagtcgatgcgaccaacaacgaactgggcgagccatccggcagccagcgcgaaaatgaaaccgcggatggtcatgcccccgtcgataattttgaagcccatcatcgcggcaggaactacgccgccgacagcgagcacctgatagatcgtgtagggcccgccaggaatccttcgacctgaggaatccttgccgataatgcggggctgctggcgggcctcggtgtgccactgaatatccacgatcagctcttgcccaatccttgcatcatctgtccgaagaattggatcgcgttaccttcgataagccagtgcgccataccacacacaaacagcatggagacgatcttggccaggctcataccgtgtttgaagatgttgaacgcggcaatgcccacgactacgaccatggcgacggctcgcaccgcggactgaccttcacctgccttgatcgtcgtccattcgaagaggttctgcgattccagtggcagcaggaggaattgatcgagcatgagaggttttcctttcaggaagccgaccgggatggtcccggtactgacgggctggacggcacgggtgtgccggccaggggcagaaggcgtgacggctggtcgagggcggcaacctcccagcggcctgcacgactgacaagagtcaggccgtactggctagtccgggtagtggattcgtcaccggtgggctggcatgtcacggtcaccgtgacggtaatcttctgccgatctgagggggtggggacctcgtcaggccccaccacatgagtggttttcaccgatacacacggggctgggtcaaccgcggtgaaagcggtccccgggctactccatctcgacaggtcagtattcccggtcagcatggcggccaagaaacccgaagaggtctgggcagccgggtcagcaggacgaatctccgaggagtccacgtcgggggctgaggccggtgcaggcatggggatctgcccaggtagacgcaaggcgatggccttgccgccggcatcgacgtggaccggaaccgaccaggcctgtccgctcccggattggccgcccatggtgaccacggtgacctgccacaggctcggatcagacggggagacggtagcgtcataggcggtgacggtggtgggcg

SEQ ID NO: 290 - DNA, 3075 bp, Propionibacterium acnes
  source 1..3075: mol_type = genomic DNA
attttgtccacccacccctgtcgattttgtccgccaagtattagacaaaccattagacagtgaattagaccttgggtcgcgtcagcgtgttagctcaccaacgcgcgcgcgcgcggcggccgagccgccgaagccaaagaaacccataccaccaacgcctgaaccagcagcccccgcttcagacagtcctgtgtcagcgcacgctgatgaggctgccgagttggcgtggcggttcgtggggtggtgtcctcagctggtaggggcaccgaagaaggtgcgtggccagctccgtcagatggttgccaagcagatccgtctccatcgtgcctggctggatgtgccggcgttgactgttgccgctgagcgagtccgggaaatcggggcgctgggtgatcggcactgcgagatcgttcgagacgagctgcacggggtgatcgccgaccagaaggccgcccccgcccgccccgacgccctgcacgcgcgggagcccaagtggtgggacgacgtgtactacgaaggaaacacaaccgtgtggtacgactctgacgaaaccagtgacgacgacgaggcgtggaaccggtcgcaggtatgtcatgttgctgagcgtgacgacatggctggcgggattgctaccaacctgctggcctcccacgctgatgatccgatggcctggctgactcgccgtcaaaccatgctgatggctcgtttcccccacgcccagaacgaggtcatcgcgatgtgccacatcgtgcgcaccgccctggaggccgacatggccgccggaacccggtgggaggactgatgagggtctcccggcgcgccctcatggccgtggcccgtgccgacgctgccgcagcagaccatgccaccggccgatgggtggccacagccaacgccaccgtcgcccggctgaccggactgtgcgaacgcaccgtccaatacgcccgcgccaccctggtccacctgggcctgtgccgcgtcgtggccaccggccgctacctcaccgccgacgagcggcgcacggctgctcgcacccatggcggccgccagatgcgcgccgcctccacccgcgtcctcaccatgtcctgcgcaatcgtttgcgccctaccccgaaggggtcaccactacaggaaagttaagttcctagatggtcaccaacgcacgcgcaggcgcgtgcgaaggccagcaacaccagagaagaaacccctgtggctgcaaaaactcgcagccctcctcgaccagcacctgccctggctggtgagaaaccatcacatcggccgactgtgccacgccctcaccgccctgggcatcgacgaacactggcaacccgcagacctcgacgccctcctcgacgccatgaaccgcaggaaccgtcgcctcggcctcgacgtgccatgcgccgacgaccagcacaaccccttgggactgttcatccaccaggcccgagacaccctcacccacgacaacccccatgaacgccgcctggcccgcgaacaccaccgcgcccaactcatcgacgaccaactccgccgccgcgcagaaaccgccacctgcgcagcccgcctcgcagccgagcacgccgaccccgactaccagacccgccgtcgtgaacgcagggaaaccctgcgagccacactcagggccgcccagcagcatgtcaggacacactgatacccgctcatacacacaccgtgaaacacgacaagccacctgacagtatcagctgcaagacgcatgacaacatagaaggacatgatgaaatacacatagacacaaccccgcacagcagtttcgcaacaaatcatgatagtctcatggcagtatcgcttgatacacacatagcatcactcccacataggcagttatgctgatatactcctactaggttatccgtccaacatgctgagtgggttcctgtacagcatgaaaggagcatggcatgatatgggccgttctcaactgcaagggtggtgtcggcaagacgaccagtgccctcctgctggcggcagccgccgccaagcagggccacaccaccctggtggccgacgctgacccccagggcaccgcatcccagtggtcagccctggcaaccaaaaacgacgaacccctgcccttcccggtgcaagcggtcaacatcgccaccatggaggcactgcccaccaccaccgacgcccatgatctcatcctcgttgacacacccccctcggcaggcgatctgatgttccaggcatgccgcatcgccgacctcatcatcatccccaccgccacctccggacccgacatctcccgaacatgggtcaccatggacgccacacaaggcacaccacgcgcgatcctcctcacccaaaccgaacacaaccgtgtcgtctaccgccaagctcgcactgccctcgccgccgacgacaccgtcgttctcctggaccacgacatcccccgccgtgaatccatccgcacagcatggggcaccaaccccccagacgacgtcatcacctactacctgcccgtcctcaacgaactcatggaggccctgtcatgaccaccaagaaaaccgacccattcgcccgccagaaagcagcagaagaccgcgcccgccaactccaagacgaagcccaacgccacgcccaccccaaacgcgtcatcggccccaccgcacgattccagttcgtcctgccagccgacgtgctcaccggcctcaaacacctcgccctcacccgcggcaccaccgcccgccaactcaccctcgacgccctcgacaccgcctacggcctcgacaccctcgccaacagcgggaagaaaacccacccatgacccgtgggtccccctgccaccaccccctcgacggcaactgtgtgcgagccacaggcccgcacacaggcggcagcccagtgccgtccccgccaggaaaggaactgaacttttctggagtgctggctccctatcaccccttatggtgctatcagatccagtagcgccagcccgagaggaaacccatgagctacatcgtccgcaccggaaatctagccggcacccccgagctgcgcgaggggtagccgacacggcggaccgtgcccctga

SEQ ID NO: 291 - DNA, 2821 bp, Propionibacterium acnes
  source 1..2821: mol_type = genomic DNA
ttcaagttccgggaactaccgccggtcacgctgattgattcccgggcgatctcgcttctgacgacagtggtcggtgaccgagaggagtcctactctgaccccgctgctgcggtgagtaaatcacgggcgtcccggatccggccacccgtccaagtgccagccagcttgatcggctaggcatcgtcaaggagcgacgatgaggtgatgatgcgatgtgagcgcaccgcgaagtgaggtataaagaagccttcccgggcgcatgcgtcgcccaggaaggccaggttggcccctggacggctgaatggttgggcggatcaggctgtagcggagacgtgcagtacctcgtaggcgatggcgttggttgggctctggtctgcatcgtggctactgagttcgacgaggatgacggtccaggtggtgatgtcgacggcggtgacgcgggcgatggtggaatcagtggatgctgcaaggaagtcggcggttatgtcttcgatgcagtgggacggagcagtgctggtgggcaggggcacggtcttgacggtcaggcttcgggcagcagagtaatcggcggttccgttaacaagctggtggacggtccagtcctggatcgggtgccggccgaagtcgcgtacgatagccgagtaaccaagttcgccccagcagaactggcgcatcccctctatgtcgcgccagacgtagaagggcgcgtaggagttctggggtgcgcctttgaccttttcttggatgaggtaggccttgaactccagtccatggtagccgtccatgaggtgtccagtctggatgacgcggtcgcggatgatctgcatgtcatagtcggtgggcagggtgatctgatattgcatggcgtacatcagcggttctccttggtttcgtgggagtaggtcgtgggggtgacgggttcctgccaatcgatggttgacaagtcgtcggcggcttgttggtaggtaaggtggatcattggctgtttgagtgcagcgccatgccagtgtctctggccggcgtcgatccagatggattcgcccttggtcaggtgctggggtgcttgtccttcaatatggaccagggcaacgccgcccgtgacgtagaggccctgtcccttggggtgtgtgtgcctcagcggcaaacgtgacggcgtgggcggcacgcccggcgtcttccgtggcacgatcggccggatccatggcggcgcgcagctgctgttctgcagccaggcgtccaggtcacggcgggcagcatcgacacccagggcagcctcgacggcttcagggctacgacgctggccgggctggttgaccgcagaccactggtgccgggcgtcgtccagatcatggccggcggcgtcgatgagggcggtggtggcttcggcgcagcatcgcctgatccactccgaacgtgacaggccagctgtctcggcggcactgtcatgcgcgccaggagagatttcatgggcgctcatctgtagcctccagataggcgttgatgtagcgcagagcctgatccgtcatgtcgatggcggctgcctcggcagacgacacaacgggctgtggatgataagaccacccaacatagacggcgaacatcaatttctcgacagctttcatgaggtccccggcggcaaccgcatccgcctcatcatccgaggagaaccacttcaggtctgaacggctgtacatagcccctaggtcctgatgtgggtcgaggtccttggaatgatggaagttcctacacacccatcgccaaagacctcaacatggacaacgctaccttcaccactccctcatctgtgaagagccagtttatgcacggtgttgaaagaggcgtcggtctacgacgaatgcgggttaatggtcttgcggtgtggggcgctgggcgatggcatcgagaacgcgtgagtgggtggcgatccattcggccgcgtcggggttgatgttgcgggcgacggtgtcgatcgctgttacgtagtgggcaagcctgcgaatctcagcttgttggtcagggtgagcgctgatgaggggctcttgatgggaggcgcggttacggacgtggcggatgagctccacgttttcctcgaagtcgcgtcggctacgccccgggtagtgaggcatacctccgttacgtaagtcagtgagagctttccatacggttgcttccaggcgcggggtgagcagaaagcgccagttgtccagtgacagactcgccacgatctgatcaggggtcgcatcgagccccgcgcgccgcagtcgcgcctcggccctggcgacgttacgcgggaaaccaccgagccgatagctcggggattcccaccaacgccgtatgccagtatcggcgctcaggcgcacgtcaatgaagtttctcaggagtacctcgacatggctgatgtcttccaagaacgctttcgagatgcaggtgttccacacgtaccacgcatcgactggttcgatccggtagcggctgagcctggcgggtgagaaccactcctgcaacgtctcacgactcaccgtgggagcgtggtaagattgatgacgataggcctcgggaaggtcaatgccgcgaaatatcggtatacccccgaggtcattgtcttgcccaggcccctcctcgcatacttgcggggcgtcattggctgccgtcatctcgtctcttcccggtacgtggctgtccatgttcacgggcaggtacggcaatgaggttcccgcacacaaacctctaccaagcatacgctggcaagccgttgcatgagacgacgcctccgcccgccacaccaacggtcaccgccacggccacggtgaccgtgaccgtg

SEQ ID NO: 292 - DNA, 2653 bp, Propionibacterium acnes
  source 1..2653: mol_type = genomic DNA
tggtagcagtaggcattcacccgtgacccacggttaccggaagccccgccgcaatcgataccactgtcagtaccatcaggggcgataggggtcaagctctccttgtcacaatcccttccccggcagcccagtaaccgtcgcttacagccatacatggatatgcgcccattcgtcggcaccgacgccgtgcgggttggcgacgctgacccgtctgctcacaaacgacccttccagcccagcaccacccactacaccgacacgatccacgaagctgaaaccgaacctcccatccccgtccgaaacatcaacgaactcatcaaccccaccaaccatgcatgaacgcacgatcgcctaccggccagccttcctgcgcgacgtgaagcggctcaaaaacaagcactacaacatgaacacacactcaaatgggcggtaaggtcacgaagtcgacgtggctgcctcacggatggcttcggcgagctcttggggtcgactccacatgggccagtggccggttggcagatccatcgcggtgaagttggtcaggtgcgcgacggcgctgaacatcggattgcctgctgcggccagctcgaggacctggacgctgggaatggagcagcagatcaacgtggttagtacatcatggcgagcgctattggacagcgcgacccgtgcccgggccacttgcgcgggttcaggaaccgcccgtgcccggaaccggtcaaggtgctcgttgctgaggccctctaaactggcctgcttgccgagagtatcgaagtcaggaagtggcagctcagctgtttcctcaggtagatctggtgcgaaggcacctccatcgctcatgggaccggagtccacccagacgatccgatggaccaactctgggtgcctgtctacaactaggctcaccggcccgttcgcgccactgtgtcccaccaggaccgcatcgccgcccatctcgtccaggatggctgagatggcgtcagcttggtcgtcgagcgtgcgcgtagtgcgctgggtgtcctccggatcgaggccaggcagcgtcagccccacggctcgactgccagcagtgttcaataactcgactacctcgtcccaagcccaggctccgagccagtaaccaggaacgaggacgataggccgatgctggtcaggtcgcgatgttgaagtcatggagacatagttgcacagtgcgcggacaagggagtggcactatttctggcatgaatttagatctgggtgtccggtgaggcgatcagaacgcctccatgtactgtccgagtgtctacgatgcagcggacacagtcgagcagctggctcacaagtttccaggtgtccttctgcccctatgagggaagtcggctgctctcgcaacctttgagggctgctctggggtcggaaccagttacagatcgttcaagttccgggaactaccgccggtcacgctgattgattcccgggcgatctcgcttctgacgacagtggtcggtaaccgagaggcgtcctactctgaccccgctgctgcggtgagtaaatcacgggcgtcccggatccggccacccgtccaagtgccagccagcttgatcggctaggcatcgtcaaggagcgacggtgaggtgatgatgcgatgtgagcgcaccgcgaagtgaggtataaagaagccttcccgggcgcatgcgtcgcccaggaaggccaggttggcccctggacggctgaatggttgggcggatcaggctgtagcggagacgtgcagtacctcgtaggcgatggcgttggttgggctctggtctgcatcgtggctactgagttcgacgaggatgacggtccaggtggtgatgtcgacggcggtgacgcgggcgatggtggaatcagtggatgctgcaaggaagtcggcggttatgtcttcgatgcagtgggacggagcagtgctggtgggcaggggcacggtcttgacggtcaggcttcgggcagcagagtaatcggcggttccgttaacaagctggtggacggtccagtcctggatcgggtgccggccgaagtcgcgtacgatagccgagtaaccaagttcgccccagcagaactggcgcatcccctctatgtcgcgccagacgtagaagggcgcgtaggagttctggggtgcgcctttgaccttttcttggatgaggtaggccttgaactccagtccatggtagccgtccatgaggtgtccagtctggatgacgcggtcgcggatgatctgcatgtcatagtcggtgggcagggtgatctgatattgcatggcgtacatcagcggttctccttggtttcgtgggagtaggtcgtgggggtgacgggttcctgccaatcgatggttgacaagtcgtcggcggcttgttggtaggtaaggtggatcattggctgtttgagtgcagcgccatgccagtgtctctggccggcgtcgatccagatggattcgcccttggtcaggtgctggggtgcttgtccttcaatatggaccagggcaacgccgcccgtgacgtagaggccctgtcccttggggtgtgtgcctcagcggcaaacgtgacggcgtgggcggcacgcccggcgtcttccgtggcacgatcggccggatccatggcggcgcgcagctgctgttctgcagccaggcgtccag

SEQ ID NO: 293 - DNA, 1468 bp, Propionibacterium acnes
  source 1..1468: mol_type = genomic DNA
cgtccagatcatggctggcggcgtcgatgagggcggtggtggcttcggcgcagcatcgcctgatccactccgaacgtgacaggccagctgtctcggcggcactgtcaatgcgcgccaggagagatttcatgggcgctcatctgtagcctccagataggcgttgatgtagcgcagagcctgatccgtcatgtcgatggcggctgcctcggcagacgacacaacgggctgtggatgataagaccacccaacatagacggcgaacatcaatttctcgacagctttcatgaggtccccggcggcaaccgcatccgcctcatcatccgaggagaaccacttcaggtctgaacggctgtacatagcccctaggtcctgatgtgggtcgaggtccttggaatgatggaagttcctacacacccatcgccaaagacctcaacatggacaacgctaccttcaccactccctcatctgtgaagagccagtttatgcacggtgttgaaagaggcgtcggtctacgacgaatgcgggttaatggtcttgtggtgtggggcgctgggcgatggcatcgagaacgcgtgagtgggtggcgatccattcggccgcgtcggggttgatgttgcgggcgacggtgtcgatcgctgttacgtagtgggcaagcctgcgaatctcagcttgttggtcagggtgatcgctgatgaggggctcttgatgggaggcgcggttacggacgtggcggatgagctccacgttttcctcgaagtcgcgtcggctacgccccgggtagtgaggcatacctccgttacgtaagtcagtgagagctttccatacggttgcttccaggcgcggggtgagcagaaagcgccagttgtccagtgacagactcgccacgatctgatcaggggtcgcatcgagcctcgcgcgccgcagtcgcttctcggccctggcgacgttacgcgggaaaccaccgagccgatagctcggggattcccagcaacgccgtatgccagtatcggcgctcaggcgcacgtcaatgaagtttctcaggagtacctcgacatggctgatgtcttccaagaacgctttcgagatgcgggtgttccacacgtaccacgcatcgactggttcgatccggtagcggctgagcctggcgggtgagaaccactcctgcaacgtctcacgactcaccgtgggagcgtggtaggattgatgacgataggcctcgggaaggtcaatgccgcgaaatatcggtatacccccgaggtcattgttttgcccaggcccctcctcgcatacttgcggggcgtcattggctgccgtcatctcgtctcttcccggtacgtggctgtccatgttcacgggcaggtacggcaatgaggttcccgcacacaaacctctaccaagcatacgctggcaagccccgacgagacgacgcctccgcccgccacaccaacggtcaccgccacggccacgg

SEQ ID NO: 294 - DNA, 2704 bp, Propionibacterium acnes
  source 1..2704: mol_type = genomic DNA
gggatgaggatgacggccgcgccgacacttcggagcgaggtcatgtgacgatccttcggtagctcgacgggttgccgtagatcttttccacgttgatgccactatgtgggttgtcggcgctaaccatttggcctccaccgatgtagacggccacgtggtgggcagggcttccccagaggatgaggtcgccgactttgagctggtcacgggccacggcagtgccgactttctgctggtcggcggcggtgcggggaaggctaatgccgatacgccggtacagcgccgaggtcaggcctgagcagtcgtagccgccatcggctttgccgttgccaccccacacgtaggcgtaggagttgttgtcggcgatcgatttggcccatgccacggcttcggccaggttcttcgacacaccggtctcgttagcggccccggtggcacagttgtttgacaggtgccctgtagtagtggatcccactatttgtttggccatggtttcccatttggcgtaggcatcgggcagggctgagccttgcactgcctgagctgcctgcgtcagcggcatcttctgccagtcagcgatgtcgactaaaccgggaatgtggaatccagggccgccggccgatccggggccagcgtaggtgatggtgtggcctttcaagaacgcctcggtggcgtaggcatcattgttgacctgatccagagtcccgtaccagcccggcaggatgcgctgctgaaaggggccggcgtcaccgtcaccgttagccttcgctgaggtagggtcggccccaagatctgattcttgtttggcggtcatgatagcgatgaccgctgcctgggtaggcagtttgtcacgctggaccacagtgacgatggtggtcacgagctgcttctgcctggccgtgaggcctccggcacccacagtgcctccggtgacggtccccacgcaagcatccccgccgacactgccaccgccgccgccagagttgtcgtcgagggccccagagcctactgacagcagcggcacaatgatcacggtcgctggcaagaccgccaggcccgccagcatcagcactgctgcactcaccacggcgatcacgtgagatgctttcaacgctgcccacctctcgctggtttgagggggcgacgcctgctggtacgcacaggcttggttgatccagtccgccgttggttggcaggcctgggtttgatcggcttgctgggacccggtttgggctccggagtcttaggctccggcttcacatgcctaggcacttcggctgcggtgggaggagtcagcacgtggcgtactggcttggtgaccttctgggcacccgaaacaaccggcttagacaccaccttggcacctttgaccaccggtgcggctgccttcgcgccggccttcttgactgcacgatgcgctttgatagccccggcctcggcccggccaaccctgctagcagtagcatcgagggctctgtggcccgtcgttgccctcaccggtgcatccttgccctggcgggtctgcttcgcgatcgccgacatgccgcctcgcaatgccgaaacatgattgtgggcgtgggcgatcgccgacatgccggccgtcgcgatttttgactggccctgcggggcccctgccccagcacgaatctgccggtaagccgccgacgtgccacgagcacccgccgccattcgcgccaccttcgcagccctagtcactcccgtcgacacgccacccgtggctaccgcagcagcacccgagaccacagtcgaggccatccgccttcgacccgatccggtgagcttgcgaccaccgctgcgcaccatccggcgagcaccccgcccagcccactggccgatcaccgagcccctttcggaacgcttgctgcgcatccaatcgttgatcttgtccctcagccccttctcgcccttgtgacgacgccacatggacatcaagaacccgataatccccacgagctcgagcatgttgacaaccatgaccttgatggcgacatcaccgtcagaggcgaaaaccgacttgatgatgagcatgaccacacccaacatcaccatcgacccgacaatgccgatcatcgagtacaagatcgaacacagatcccggatgagcggatctgtgcggccagggatagcccgcaacacgttgagcatcgacatgaacgccgaccacaccaacttgcacacgtagaaccagcacatgcccgcgaacaccagcaggaccacagccaaacccgccaccgtcgacgagtaaaagaagaaacccaccaaccacgaaccatccgcaatatcgccggcgtaatccgacaacccctcatcacagtcaccaaggtcgtcgcgagcatccgagacgtcatcgtaagggccacccttgagcacctcgatgtacttgtcgtggcacttcgcatcaataatccggccatagttgagctgctgatgaaccggcgccacgaacgagtccacaatgatcgccgacagcttcggatccttcgagtctcccgtcgaggtcatgtcatcaggaatctcgacctcaccagcggtcgccgtcgcaggatcaaccgaactggtaatcatccgagacagcgccacaccgaactgctgggtgcgagccagcggagtagccaatgtcgtcgtatcgcctgcgaacttcgccaccggggccgccaagaaacccaacgccagcgccgcagca

SEQ ID NO: 295 - DNA, 2471 bp, Propionibacterium acnes
  source 1..2471: mol_type = genomic DNA
aggcagggtcgtcgggttcctcgactaccggaggtggggtagggctgagctgttcggtgtcgtcggccaggtcggctcccaggatgcgttcccattcggggctggttttcttgcccgctgaggccatcgtctcgtcgatctgttcgtcagtgggccacacaaatttctttttggtccaggtcgtggtgtcgggtcgcagctgatccagcagttccaggtcttgcggggagtgggccttgcgggggtcgggggtgtagaagaattggacttccttgggggctgattcgccggataggtaggtgcctcggccgcgtttaccgaacgggatgcccacgccgacgtgttcggagccgaacatcatgcgggctccgtcagcagacaggggtccggtggcggcacgcccggagaagttgtctcggatttcgccgcccaggaactcggcgtcggggcgttgggtccccagatcgacgtggatacggcaggcggctgccatgcgcagcagggagccgatccagccgaaaacggggcattctccgggcatcccagagaccttgatcgttgaccaccagtttttcgcgttgccgtagaactggcggtactcgtcgatgaggaccagcacgcgggtgaagtcggtctcgcgggccccttcttcttcgatgcggcggtagcggtcctccatgagagaccacagccagtggatgagggcgacctggtcggggacggtagtggcgaccatctcgatgttgggccactcccgcaggcccaggtactcgatgcgtttagggtcgatgacgaagacgcgccagttgcggcgggcaccctcgacggcgtcgccgatcatggacaccgtttttccggtacgggtgcggccggccttgagctggtgggccatgacaccggagatgtcccagaaacaggtgttgccgtcctcgtcgacggcctgggggattttctcccagtctggggagtctgggccgggaagggccacgggtcggggcaccatcgagggcagggggtggcggcgggtgacggtgatggtgtcgtgttccaggtcgaagtcgctgcgccactggccgagcatcatcgccgaggtcaccgcggccaggcgcaattggatgttcgggctggacaaatgggcgccacgttggtggtgaatggtgaagccgtccaggttcccccgatcggttttccaggaatcgacggtgaccgccgacccatagatctgagtggctacttctttagcccgttccttgtctcggtccagatcggttttgtcagggtcaggggtcggggcgcggtattgcaggacgaaccggccggccgggatcgttgcggatgtcaccgtgaactctgccggcgaccaggcagccgcggccgcctgggtgagggccattggcatggtctcgacggcagcctcctcgggggggatggtgagggtcaggcgtcgcggatgcgtcttcttgcgattccatgtgactttctgcctcaccggcaccttcgccgccgactgaatggctaggcgagctgattcggcagtttcggtacgccggccagcgcgtagcgcccgtcgtgcgtgaaggctgcccaccacagcacagcccatacacggcagccaccagcgcggatcagcggctgctgcatagcccccggtagctagtaccgcacctgaccagccggccgcgatacttttccacgccggtttcgcgccaccaggaccagcgttatggacggtctgcttcgaggctgcggagggacgagacagcggagtgctggtcatgccgcggcctccttgtggcaggtcatttcacaggcatgccggccagcgatgatgccgtggcgcaccgccccggtagccgcatagaccgcgcacaactcaaacacggggcacccatcgcaggccgccgggttcatgctttctttgtcccacgatggtgggtcatcggtgcacggcacggccaggccatcctgttgagcggcgctgatagcggtgaataggcgcagctgggcgcgaacttggtctggggtcaggttgacggtgcgggctacacgcatggggttccttcctcttcaccagtgaaggttccctagacccggccgatgtgcggagagatttcagtgttttatcgaggtgaccagccatccggtctgcgctgcgggttcaggtaccagggtcagatgcagcatggtgtggtcggctaggggcacggcgaccaggggcccgtcggcgctcgccccggtgagggtgggagttccggccacggtggtggcaggaatctggttgggtttcgcggccatcagggagcccatgagggtcggtgcggcgatctggacgagggcgactttgcgggcggcgggatcgcgggtcaaccagccgcgggtgaaagcgagcgccgccgacgtgatatcggggctcagcggggctggagtggcggctgggtgggccgttgaggagggccacacgcgcggtagcg

SEQ ID NO: 296 - DNA, 2537 bp, Propionibacterium acnes
  source 1..2537: mol_type = genomic DNA
ttggtattggtaggcgatggtgtcaccggttttgttgcggatgacgtcgaagccttcgatgtcggaggggatgtcgtcggcgtcgtagacgacggtggtggtgacggggttggaggccgacatttggccgatggtcacgcgcagcatgtttttcaacgcggaggtgaggattgtcgtggcggtggggttcttgtctgcccagcgtttctcggcgatgtcgatcatgtcttggatggttttgacccatcctcggatgggatcgactttggtcagtttgatccctccaaggaactcgatgggcttagtaacgggcccgtcaggaccgaattcggtgtcccagccttcgtcgatggctagtttcagttcggcggcgtcaacccatgtttcgtgggtggtgccgggcacgttgggccaaaaccatcctgctcgtcctttggtgcgtttgaccggtagtaggccgatgtcgtcccaccaggatggcacggtgaagcggatgtggtagcgggccgggtgccaggggttgttggtgaacaggtcgtgagcttcggtggcgctgagcagagtggcgggtgcggcaccgatctctccggtcactgatccggcatacatgaatcggccgtcgatgtacacgaagttagggatagggccggcaggcacggtggggcgccaaccttgttcgcggtcctcggggttgccgtcgtcgacgcatagttcgtagcggtgctgaggggaggtgtgttggatgagtgcgcccagttcggggtccatcggctccatgcgataggactcgggggtccgtagcttccagaggttgattccttctgctccggggcggtccatgagggcccagtcgcggtcgattctggtggcgatgatgtgggttaattcgcgccatgcccagcgggcctggattggggtgagggtctggccagggaaccattcatcagcgaccagaatgtcgaggttgcggtcggtttctttgtgggtgaaccggcctcgggcgggccgcccggacagcatgaacaggccccgcacgtgccagtcctggttgaactcgcgggtgtgagcgggggtgtcaggcagcagccaggattgaggctggtcggggatgttaccgcagacgatcaggcgtcgggcgttgtggtgtagcgcggttgttagcaggtctgacagggtcgcgtgcttggtgcgccgcccccctagcactggcaggatctcgtttccggccgcgtcgactccccgggcggtgtcgatgtctagccacactgtttcggggtcggggggccgatgtggggcgggacggcgctgctcctggtcgtctctcatggtttcctcctttgggccagggagcggccggcgtcgagggcgttcatgcgctcgcgttgttcttcgcgtagttggtagacccggcctcgtgacactcctgctgcctcggcgatggtggtggccggcaggtggccgatggcggcagcgtcggcaaggacgtcacgccaggccaggtcaatggttcccagctgggctagagcttcgtcgcggcggcgggtggcatcagccactacggaggcccaccctgtggggtggatggtcttgacgacgattcggttgtggcggatggggccccatgcatcagcggggacttgccagccgtgattggcggcggactcggtgatcttgaggcgtcgctcaggtgcgcgggtgcgggcagtgacgtcggtgttccaggtctggactggtacccacgtcccctctcggatgcgttcgatgacgcacgtggtgacctcgtcggtgactgtgatgaccagacgataatctttcccgtctggggtggttcggtagctgggcatgtcaccctcccctatctgtcaaatgagctagacacagtgtctatttaatttgacgcaaagtcaagtgcattagacgcctttgtgtggatccgccccaccagacaaacactcgcgcctcatgacccgccgcgaagccttaacgaaaccaaaccgcttatagaaccgctccgcagcgctccccgagggctttagctccaaggtaagaccttgctcgtcggcccattggcagacttgtgtgaggatctgtgagccgtagccctgatttcggggggcggcatgcacgcacatcagcatgtgaccatgacggcgggtcggcgggctgacataagccccaccacgccagtccggtgtgatctgccaacttcgccatgccgcagcgcgccagcggcgggcctcggtagccaccatgatcaccgcgacgacgacgagcgttgcggccccgatcatggccagctcactccagccaggccagttcccggagatgatccagcctcccagcgcccagatgatcatggcttccacgcccgccgcaatcgggacgagtggggcagtacggatgcggcctgccatgatttcggtgatctcgctgcgatgccacgaccaagagaactcccacgaggcacgaattaggctcatgcgtgaacggcttcctcggcttcgctttgccatagcttctctagacggcgctcggct

SEQ ID NO: 297 - DNA, 2332 bp, Propionibacterium acnes
  source 1..2332: mol_type = genomic DNA
ggcggcgcaccaggtgcgccgccttcccccgtgctggtgtctcgtcggcttactggtgggggtcgtaggggaacccgtaggtgtgttccagggccttgcggagaaggtcgttcatagttgtgtgttcggcgacggccttcatcttcagcgccgtgtgggtggcggtgggtagcttgacgttgaacgcggtgatcggggtcttggccgactggaaggtttcagagacactggctccctggctggccgccatttggtcggcgtaacggctggctttgtcggcggcggtgggtttgcggttcttactcacttcagcatctccttgattcggtcggcaacctgggcgaactctcctagatctgttggccgggttccgatggcttgccgataggcgacccgtcgatgaacctccgcatcgagaacgtctaggccctcaacggcggcggccccctcgtgggcatcacggtattgcctggtccaatcggctttgttgaagagcagggcccggcgtgtgccgtgggccacctggtaggtcattagcgctcggtccatgtccaggtcccccgactcggtcgggatgatgaccacatcggcgatgtcgagggctgcggtgatcgtctgagagtcaccggggggagtgtcgatgatgacaaggtcggcgtcgatgtcacggcagcgcctgacgataggggcattagccgggcggacctcgaagcccagcgggtcaccagtctcgaaagcgtcggtagcccatgacgtcgccgatccttgcgggtcggcgtcaagcaagatgactcggtactgagctgctaaggccgttgccaggtagaccgccgtggtcgttttcccgaccccgcccttggtgttgacaatagaaatactacgcataaatacatcattacacatgtgcatcgatgtatctgtatatatgtgtatcggcgtgttgtgagggaaaacccgggccacatacaacgatcccccagccaccacagccgggggatctctcagtaaagccagcaactcccacagaagttgcacccccacgatacccaccacatccgtgtcaagcccccacaacacccaccagcgccctaggcttcccccatgaacattgacatggacacaccaaccgaaaccgaagccgacaccttcgatgccgtcctcgccgacattaaccacatcaaccgcctcaccgccgacgaaatcgagtgctactccatgggagcctgtctcctcctcctcaaccaccaccccttctccgaactccgccaacactgggccgacaaccccaccgacgaaaccacgtggaccctctacggggccatcatcgccgcctccaccctggacccccacctcagcatcgacgccctagcccgcctctaccagctccccctcgacctcgtgacccaagccctcaccgtctaagcgtcgatgagcgggggagaggtagcgcactatcggctaaggaaccccacaaacaccaaacccttgtcactgggaagggtttggtgttatgctggtctcacaactcaacagaggaggtgagacatgggaaatgagtaccagaagtcgctcaaagtcctgttcaagaaactggaatctgagcaaggagcccgcatcgagacccggcgcaaaggatggatgatctacccgccggatacgtcacgatcagcggtcatgatccacaagactccatcagatcgcagagcatgggccaacatgctttccgaactgagacgctcaggattcaccgtctaactcagtgaagggggctggagctccagccccctttcaaccacctcccccggacaccacacaagaaaaggagaacatgatgtggcacgttcggttgtcgcttcgcgcaatcagcgaggacatgctgttcgacgccctggacaccctcgaccccttatccccggtggccacactgggccccgatgagcacaccggatcattggcggtgttcgtcgaggctgactcactgacagacgccatcgagactgcccgcacagccatcaccaacgcatgcaacaccgccaccataaccggcgtagaagcccgccccgaagacgaatgcttcgcagacgttgaccggcccctgttcccgccagtggtcggatacaccgaaatcgctgaaaccgcaggactctcacgtcagcgcatccgccagctcgcaggcaccgccgggttccccgcacctgtcatcaagaccgcggccggcccgctgtttcccaaagccgccgccgagcagtgggcgcggacacgccagcctaaggcaggccgcccaaaactccagaccaccacctcataacacatcccgtgtgctgaacctgtt

SEQ ID NO: 298 - DNA, 522 bp, Propionibacterium acnes
  source 1..522: mol_type = genomic DNA
cgacgccgcggcggggtaacctcctcgccccgctccaactgtgttaacgcctcgaccaggttggtgcccggtttcagcccttttagcacgaaccgcaccaggcgggggtctcggccgattcgtcgggcaatctcggcttggctccacccttcggctaacagggtgcgcaacaagtcttgggcccggttatcacgctcagtcactggtcgcctcctcggggagtcctgcctgctcggcctgctctgatagagcagcccgttccgatccggtctggggcgcttccaaagggcccggcaagacacctttgacacgcagccgcccgtccttgccgtcatcgccgcccccctgggccacagggagcgcccaggggggcacgttgctggtgtagatggcgtcgccgtggatggccagcagggtgcgggagttcatgcgtagtgctcctcccttggttgtggcgttttttccggtggtggggtcggcgatgggtgtgttgagggtgcgtacgcgggacagggcccagat

SEQ ID NO: 299 - DNA, 522 bp, Propionibacterium acnes; identical to SEQ ID NO: 298
  source 1..522: mol_type = genomic DNA

SEQ ID NO: 300 - DNA, 2317 bp, Propionibacterium acnes
  source 1..2317: mol_type = genomic DNA
aggtcgggatgatgggtgctgttgctgatgcggccctcgctgctggcggcgctgtgatcggagtgatgccgcagcacttggtggacggggagatcgcccatcctagtctgactcacctcgaggtagtgcggactatgcatgagcgcaagcagcggatgagtgacctagctgacgcgttcgtcgcgctacccggcggcggcggaacccttgacgagctattcgaagcatggacatggcagcagctcggtgtacacagcaaacccgtggccttgtacgactcgaccttctgggcaccgctgaccgcgctactcaaccacatgaccatcgaaggcttcatccgccctgaggaccgcgcctcgctcgtgatcgccgataccatacatcagctgatggccgatcttgagggatggaccccaccaccaccgaagtggcgctcgtgacatagaacaaatgattctgactatggctcattgacatctgcgcagcggctactagctccattgacttcaaatcgggccttggccgaggctcggttcaggtggcccggaatggatccccacaaattgaatgctcatgatcgaggtgatgaacgcccactctattgtcctacgcccggttgtatccagcgagcaattgaaggtgctgcgcctgttggtcgaccaggccgagccactcatcatcgacgggcgcatcttgtacgaggcatgggacaggctgcaaacagcccgtccggcccgctagaaaaaatttttagggcccgctccgcacatcccggtctgtacccacaccttcaagggtgtgaagggaataaaaacacacctaacaacaactttgtttcatgatttggcgcgtcggaccctttctgaccgatgtcgtgcgcaacaatggacccatgagttcgcctaccaagatgcgccggaaggggacacgcggcccgaaacctcgcagcgacgaggagctaacggctgtgatgttccgcgtcccagagtcagtggccgaacgtgtcagcgatatggcttgggagctgaggctctcccgatccgatcttgtgggctggtcggccctctatgcactcaactcgatgctcagacagcgcggagaggacacgattccggttccggagtatctggacaaggccgtgctcgctgcgttgtatcccgatgggttgcccttcgacgaggacaccgaggagccgggcgagaatgccgggcaggaggagcttgcgatgactggatgagcccgaacatggttgaaggccgccccgccaggcgaccttcaatcaatggtttcggttgtcagctgcagccacccttgccaggtgctgtggttcttctccagaggaggagggaccgccatgaagacccagaagacctagaagatccaaaagaaccggtttcggctgttgcttcggtcttcatggtagctgatagcccgcgtcgttggaagtgcgacgacgccgatcctcatcggtatcgcaccctgttccagggtcgagaatgtgaaggattaacaaccatgacaagtcatgagacgccctcccggagggcgtcatgaccgctttaattcaagctctgccgacagctgaactgtctgctggacctggtgctagcagtccagctagaccctctgctgagggcttcatcaagattcaccacgacctcattagtgcgggcgtgtcgggtaacgcgatggcgttgttcgtcgcgttacgtaaccagcccggctgtgatcagtggacccgtcactcgtacctgcggctagcccaatggtgcggctgggatgggctgtcggaggcggcgggctgtaagcgggtgcagcgggccgctgctgagctcgctagcggtggttggctggaatcgcgggtcggccatgatcgtcgcaccgctaagacgctggtgtggcatcggttgaccagccccgacaccgaccgctgggagcaattgccgcggattgtgtgggcgaggatctgccagatcgccggggagacgtcgggagagtgggtgaggcattggctggtgtggcggatgctggccggtcgtactggtgtggctcaggcccctacgtccatcgtggcccggttcctgggctgttcttcgcgccaggtctctcatatccgtggggctctcgttgatgccggtctgctcggctgtgacgaggtctcgggggcggcgagccgggtgtggttcccctcgatggccgaggagtgtgcagcggatcgtgaggtggtcgatggggccgtcgtcgatgctgaggtgggctctggtgaaggtgtcgaggagggcggggaacccctgtcgattttgtccacccacccctg

SEQ ID NO: 301 - DNA, 2290 bp, Propionibacterium acnes
  source 1..2290: mol_type = genomic DNA
cccccaccagccagcctggccgtcaacggatcaacgtcaccgtctacgttgtgcccgaactccatgagcggctgcgctcccgatcggcggcgacgggggtgacggtctcggatctggtggtgcatgcgttagcgttcgtcgccgatcatgcgggggaggcgatcgccgatgatctgcgcgtcgagacgggccccggcatgggggccggactgttcgatgtgaccccatcgcggccagtaggggtcgccaaaacccagctgggggtgcgaatgacccgccacaacaaggatggcttggaccagctgacccggacgagtggggcccgtgaccgcagccatcttgtgtctgtcgccgtgcgcgactatctcgactccaaccctgtaaagaaaggccgacatgtccgctgatgaaactcctgccgcccggggtgggcgacgctttgatacgaccgtcaagcccaggcgccgtcccatgcttatcgccgccggtatcgccatcgtgatagtcggcgcgctcctcatcactcagttgattcgctccgcccaaaccgagcatcgcgtgctggaagtccacgccgatgtggctcgcggcgaggtcatccgtgacaccgatctggtatcggtgactgtcggccaggtcgacaacgtatcaacggttcccgcagaccagctcgactcactggtcggcaaacgcgccacggcagatcttcgagccggatcactcttgcctgctggggctatcggcccggccgatgtcgttccagctccgggcaagtcgctggtcgggctgaagctagccgccggacagatccctatcggagaccttgctgccgggacgaagctgcgcctgatccagacgtcggcacccagcggctcatccaccaccactgatagcagcaccaataccgatggccagtcgtgggaggcaacaatggcgaccggcaccaaaaagaccgagcaggtcaccttgatcaacgccgaagtgaactcgcgtgatgccgcccggatcgcccaactgacgtcacagggccgtatcgccgtagtgaaggatccgatccgatgagcaccattgttttgaccagcgtctcgggagccccaggggtcaccacgacagcgatcgggctgggcagggtctggccacaatcgagcctggtcgtcgaggatgacacccaccacgccatgctggcgggctacctgcgagcctcccagcacgccgaaccgaacctggccgcagtggcgaacctgacgtcgactccaaccaacgcccaaacggtgtgggaatctatcgccagacccctacccaccgatgacccagtcggcgggctgcgacgcaaaggcatcctcggcccgcccacgccgtggtctcgcgcaggcatcgacccccgatggggattcatgctggccctgtggcggcaactggaggaggctggcatcgacaccatcatcgatttgggtcgcctagccacaccactgacctcaacgccacacctgatcgccgcacccatcgtcgaggacgccgacatgatcttggtgatgatcgaggcgacactacgcgacatcgccggcgcccgcacgatggtggagggactcgctgagcagatgaacttggccggcgcctaccgacgtctcggactgcttgtccaccgtggcggccaggcccgcggcgtcgccgagttcaatgacaaggagatcacctcggcgttacgactcccggtcatcggggccattacccatgacccggccggagccgcccaactctccgacggggtcgggcagcggttcgacaagtcacgtctggcccactcactatcaaaggtggcggccagcctcgtcgatgccataaacaagcgccacgctgatgacgaggaggatctgtgatggccagttttgctgataatccgttcgacaagctgcgctcccaggatgcggcaagagcttcggtagagcaggagcctgatgccggattagcgtcggagttgttttcgacgtcgtcggggtgggccagctctcagcaggtgtcccaagctcaaccggtgatgacccgttcggagaacgtggattggccggttgtcgcggagctagccagtacggccactgatgaggttgaggctgagatcagccggtggagttccactcatgatggggtggcgacgctagacattcgccaggccatcgcggagcctgctattgcctcggcggtgtctacgtatgctgaccgacgccagatcgatgtaggggagacctggcctgatctggtacgccagcgataccgcaaggctgtgtgggatcag

SEQ ID NO: 302 - DNA, 2310 bp, Propionibacterium acnes
  source 1..2310: mol_type = genomic DNA
ctgtgggagacgatcatcacgtacccgttagatcgtcgccctgacaagatcgctgcgaacctcatcctcgacacgttgcaccgggttacccggttttggcgtgctgattcccccgatgaggaagaggctcacggtctggtgcccttccctgacactctcatcgccccagagcccgatgaggacgtcacagctagccaggccatcgccttggcggtggaccgcaactggattaccgaggacctagcccgcctcatgagccatatttactgtgacggtatgactggagctgatgcgggtcgtctgcatggctgcgctccagctacggtgcgatctcgatgccgtgatggtcgggccgtgttgcagcgcaacgccgagacgatcctggccgtctgctgatccctctcttgctcatgcctgccgccaccctacccctacctgctagaaacatagccatgtctccagcaacgcatctagcatatcttctagcaattgatctagctaccatatagctgatgatctagctatcatatagctgtgtctccagcccaaaggacagcccaatggcatgcttgccacaggaaggtgcgtcagcctcccgaaatactggaaggagctttaccgtgcaggacatgacctcgaccagaccgattgaccgatccccgttcgaccgcactattgcggtgtggaaccacaaaggcggcacgttcaagacgtccgtcgtggcgaacctgggatacctgttcgccgccggtggcaacaaggtgttgatggtcgacatggacccccaggccaatctcgacattgacttcggtatacccgcgggagaacgtgaacggggcatgggattagccgaggcgctacgtgaggggacggcccttcccccaccgcagcatctcagcgaaaaccttcacctggtcagtggcggcccggccctccacgagttcaccgaccccgcatccttagcggccatcctcgaccgagtcaccaccgcacgctacgacctgctagctcaggcccttgccccgctggcctgggactatgacctcatcttcatcgactccgggccggcccaaactctgctgtcccagaccatccttggagtagcccgctggctggtagtgcccacccgcaccgataacgcctcaatcactggcctcgtcgacgttcaagacgccatcgacggggttgcctcctgcaaccctgaccttcaactactcggcgttgtcctagccggcgtgggggcccgggccacccggatcgccgcagataaacgccacgccatcgacacagtgctgggggcaggaaccgttttcgatgcggtcatccactactccgagaaggtgtccgtgctcgcacgccagcagggcaagaccgtcgccgagctagccaacgactaccacaacacccagcccgcctacacctacctagctaaaggccagaacatccccaacgtcgccaaggcagccgtcagcatcgaaactgattatctgaggctggccaccgagatcagcgaccgcatgttcaccagcgacgagcaggagcctgatcatgactgacgatccgactccatccgagcagaacaaccccaccagcgacgacatgcgcttggccgaagaatgggccaacagcggccgcacagtgggagccctgccgcgccgtcaacggcctcagcgacccacaccccgcaccaccagccaaccccctgtctcgtcccctgacacaccggctccgaaaaaaccccagaagacccccaccagccagcctggccgtcaacggatcaacgtcaccgtctacgttgtgcccgaactccatgagcggctgcgctcccgatcggcggcgacgggggtgacggtctcggatctggtggtgcatgcgttagcgttcgtcgccgatcatgcgggggaggcgatcgccgatgatctgcgcgtcgagacgggccccggcatgggggccggactgttcgatgtgaccccatcgcggccagtaggggtcgccaaaacccagctgggggtgcgaatgacccgccacaacaaggatggtttggaccagctgacccggacgagtggagcccgtgaccgcagccatcttgtgtctgtcgccgtgcgcgactatctcgactccaaccctgtaaagaaaggccgacatgtccgctgatgaaactcctgccgcccggggtgggcgacgctttgatacgaccgtcaagcccaggcgccgtcccatgcttatcgccgccggtatcgccatcgtgatagtcggcgcgctcctcatcactcagttgattcgctccgcccaaaccgagcatcgcgtgct

SEQ ID NO: 303 - DNA, 2632 bp, Propionibacterium acnes
  source 1..2632: mol_type = genomic DNA
ttggtattggtaggcgatggtgtcaccggttttgttgcggatgacgtcgaagccttcgatgtcggaggggatgtcgtcggcgtcgtagacgacggtggtggtgacggggttggaggccgacatttggccgatggtcacgcgcagcatgtttttcaacgcggaggtgaggattgtcgtggcggtggggtttttgtctgcccagcgtttctcggcgatgtcgatcatgtcttggatggttttgacccatcctcggatgggatcgactttggtcagtttgatcccttcgaggaactcgatgggctgggtgatgggcccatctggtccggcttcggtgtcccagccttcgtcgatggctagtttcagttcggcggtatcgacccatgtttcgtgggtggtgccgggcacgttgggccaaaaccatcctgctcgtcctttggtgcgtttgaccggtagtaggccgatgtcgtcccaccaggatggcacggtgaagcggatgtggtagcgggccgggtgccaggggttgttggtgaacaggtcgcgggcttcggtggcgctgagcagagtggcgggtgcggcaccgatctctccggtcactgatccggcatacatgaatcggccgtcgatgtacacgaagttagggatagggccggcaggcacggtggggcgccagcccttttcgcggtcctcggggttgccgtcgtcgacgcatagttcgtagcggtgctgaggggaggtgtgttggatgagtgcgcccagttcggggtccatcggctccatgcgataggactcgggggtccgtagcttccagaggttgattccttctgctccggggcggtccatgagggcccagtcgcggtcgattctggtggcgatgatgtgggttaattcgcgccatgcccagcgggcctggattggggtgagggtctggccagggaaccattcatcagcgaccagaatgtcgaggttgcggtcggtttctttgtgggtgaaccggcctcgggcgggccgcccggacagcatgaacaggccccgcacgtgccagtcctggttgaactcgcgggtgtgagcgggggtgtcaggcagcagccaggattgaggctggtcggggatgttaccgcagacgatcaggcgtcgggcgttgtggtgtagcgcggttgttagcaggtctgacagggtcgcgtgcttggtgcgtcgtccccccagcactggcaggatctcgtttccggccgcgtcgactccccgggcggtgtcgatgtctagccacactgtttcggggtcggggggccgatgtggggcgggacggcgctgctcctggtcgtctctcatggtttcctcctttgggccagggagcggccggcgtcgagggcgttcatgcgctcgcgttgttcttcgcgtagttggtagacccggcctcgtgacactcctgctgcctcggcgatggtggtggccggcaggtggccgatggcggcagcgtcggcaaggacgtcacgccaggccaggtcaatggttcccagctgggctagagcttcgtcgcggcggcgggtggcatcagccactacggaggcccaccctgtggggtggatggtcttgacgacgattcggttgtggcggatggggccccatgcatcagcggggacttgccagccgtgattggcggcggactcggtgatcttgaggcgtcgctcaggtgcgcgggtgcgggcagtgacgtcggtgttccaggtctggactggtacccacgtcccctctcggatgcgttcgatgacgcacgtggtgacctcgtcggtgactgtgatgaccagacgataatctttcccgtctggagtggttcgatagctgggcatgtcaccctccccccatatgtcaatctaactagacatattttctagcccatctgacacattgtcaaggacaatagacctttcgtgtgaatccaccccgtcaaatgcacactcacgcctcatggcccgccgtgacgccttaacgaaaccaaaccgcttatagaaccgctccgcagcgggcccggagggcttcagttcgagggtgagaccgtgctcgtcggcccattggcagacttgtgtgaggatctgtgagccgtggccttgagtgtgggggacggcgtggacgcacatgagcatggggccgtggcggcgcgctggcggggccacgtaggctccgccatgccagtccggtgtggtctgccaacttcgccatgccgcagcgcgccaacggcgggcctcggtagccaccatgatcaccatgatgatggacagggttacgacgccgactatggccagctcaccctgaccaggccagttcccgcagatgatccagcctcccagcgcccagatgatcatggcttccacgcccgccgcaatcgggacgagtggggcagtacggatgcggcctgccatgatctcggtgatctcgctgcgatgccatgacaaggagaattcccacgactcttgaatcatgctgatgtgtgaacggcttcctcggcctcgctttgccatagcttctctagacggcgctcggctagctcgtcggggcacggcgacagcctgccgcactcggagcagaccccgaagtggcgcgagagagtgatgaccggctcgtcgggagcatgaaccga

SEQ ID NO: 304 - DNA, 2061 bp, Propionibacterium acnes; identical to SEQ ID NO: 205
  source 1..2061: mol_type = genomic DNA

SEQ ID NO: 305 - DNA, 2219 bp, Propionibacterium acnes
  source 1..2219: mol_type = genomic DNA
gctgagaaaaattttgggtccgccctgcatatcggggcctcttcataccttcaaaagtgtgaagggaatacagactcttcgactggaattaaaatggtatatggcgtgtccggtccgcacccagctccacgatgcgccatagaggagccataacttcaccaatcgtatacgatatgagtgtaggtgagcatctaccggtggccgacagtcagatacaagcatgggcggatgaagcagaagctgattatgacctcagcatgcttccgccgtctcgacgtggtcgcccaccggtggggaggggcccgggcactgtggtccctgtgcgcttcgacgcggacactctcaaggcgttgtcacaacgagcccctgacgaaggattgaccacgcgttctgacgcgatccgtgctgcggttaaccagtggctcggcctcggctcgtaaacattatcggcgcgacaaccttactgatgacgctgttggttacgccgtagagcacatcttgtactcgtgggcgctcgacgatgccgatgatcctcgttgctggatgatgattcggtgttgacccagctggcctcctcatggagctagttatcctcatctacgacgatggctatgaactcctgatccacgccatgaaagcccgccctcagtatctgagctacttcgctatctagtgttgttgggcgagttgaactcaacttttctccgacgcaagcgccaataaaaggctgatccatccgaataccaccaaacacggctgaagtgtggaacagattcagcaagacagggtgcggtgctcgggtgcgttggggagatgaggatattcaggcttctggcgggatgtggcttgatgacgtccaggatcaccggttcggttttgaaggtgccttgcattaatgtcgacagggtcgtacgactcgaggactggatcgaccagcccgttgcgtctgaagaacttcatccaccccggtggagctccggccgcgtactggtgcaacggatcattagcatgggtagcgtgagtatgccttcgatcgtggtcagtgctgtcatcatccaagattctgacgggcggcttctcactgtccgtaaacgaggcgccgaggcattcatgctgccaggcggcaagccggagcccggcgaggactcgcgtcaggcagtagtccgggaagtgcacgaagagctcggcgtcgcattgtcttccgacgacctgcgtcgggtgggagtgttcaccacgcgagcagcgaatgaggccggccatcaggtggtggcgacgattttcacccacaccccggttgcggtgagtgagccagctgctgagatcgagcagattcgttggctcgattggagtgtcgacgccctgcctgatgacctggccccgctgctggtcgaggcagtcatcccgtggctgcggcgccgtatccggtcggtcgctgtattcacgggtgcgaaggatggaaccgaccctcattatcgtgtcgaagcaaccgccttgggccggggtctcgcacacgccgggatcaccctggtttatggcggcgggaaggtcgggatgatgggtgctgttgctgatgcggccctcgctgctggcggcgctgtgatcggagtgatgccgcagcacttggtggacggggagatcgcccatcctagtctgactcacctcgaggtagtgcggactatgcatgagcgcaagcagcggatgagtgacctagctgacgcgttcgtcgcgctacccggcggcggcggaacccttgacgagctattcgaagcatggacatggcagcagctcggtgtacacagcaaacccgtggccttgtacgactcgaccttctgggcaccgctgaccgcgctactcaaccacatgaccatcgaaggcttcatccgccctgaggaccgcgcctcgctcgtgatcgccgataccatacatcagctgatggccgatcttgagggatggaccccaccaccaccgaagtggcgctcgtgacatagaacaaatgattctgactatggctcattgacatctgcgcagcggctactagctccattgacttcaaatcgggccttggccgaggctcggttcaggtggcccggaatggatccccacaaattgaatgctcatgatcgaggtgatgaacgcccactctattgtcctacgcccggttgtatccagcgagcaattgaaggtgctgcgcctgttggtcgaccaggccgagccactca

SEQ ID NO: 306 - DNA, 2218 bp, Propionibacterium acnes
  source 1..2218: mol_type = genomic DNA
caccaaccatgcatgaacgcaagatcgcctaccggccagccttcctgcgcgacgtgaagcggctcaaaaacaagcactacaacatgaacacacactcaaatgggcggtaaggtcacgaagtcgacgtggctgcctcacggatggcttcggcgagctcttggggtcgactccacatgggccagtggccggttggcagatccatcgcggtgaagttggtcaggtgcgcgacggcgctgaacatcggattgcctgctgcggccagctcgaggacctggacgctggggatagaacagcagatcaacgtggttagtacatcatggcgagcgctattggacagcgcgacccgtgcccgggccacttgcgcgggttcaggaaccgcccgtgcccggaaccggtcaaggtgctcgttgctgaggccctctaaactggcctgcttgccgagagtatcgaagtcaggaagtggcagctcagctgtttcctcaggtagatctggtgcgaaggcacctccatcgctcatgggaccggagtccacccagacgatccgatggaccaactctgggtgcctgtctacaactaggctcaccggcccgttcgcgccactgtgtcccaccaggaccgcatcgccgcccatctcgtccaggatggctgagatggcgtcagcttggtcgtcgagcgtgcgcgtagtgcgctgggtgtcctccggatcgaggccaggcagcgtcagccccacggctcgactgccagcagtgttcaataactcgactacctcgtcccaagcccaggctccgagccagtaaccaggaacgaggacgataggccgatgctggtcaggtcgcgatgttgaagtcatggagacatagttgcacagtgcgcggacaagggagtggcactatttctggcatgaatttagatctgggtgtccggtgaggcgatcagaacgcctccatgtactgtccgagtgtctaggatgcagcggacacagtcgagcagctggctcacaagtttccaggtgtccttctgcccctatgagggaagtcggctgctctcgcaacctttgagggctgctctggggtcggaaccagttacagatcgttcaagttccgggaactaccgccggtcacgctgattgattcccgggcgatctcgcttctgacgacagtggtcggtgaccgagaggcgtcctactctgaccccgctgctgcggtgagtaaatcacgggcgtcccggatccggccacccgtccaagtgccagccagcttgatcggctaggcatcgtcaaggagcgacgatgaggtgatgatgcgatgtgagcgcaccgcgaagtgaggtataaagaagccttcccgggcgcatgcgtcgcccaggaaggccaggttggcccctggacggctgaatggttgggcggatcaggctgtagcggagacgtgcagtacctcgtaggcgatggcgttggttgggctctggtctgcatcgtggctactgagttcgacgaggatgacggtccaggtggtgatgtcgacggcggtgacgcgggcgatggtggaatcagtggatgctgcaaggaagtcggcggttatgtcttcgatgcagtgggacggagcagtgctggtgggcaggggcacggtcttgacggtcaggcttcgggcagcagagtaatcggcggttccgttaacaagctggtggacggtccagtcctggatcgggtgccggccgaagtcgcgtacgatagccgagtaaccaagttcgccccagcagaactggcgcatcccctctatgtcgcgccagacgtagaagggcgcgtaggagttctggggtgcgcctttgaccttttcttggatgaggtaggccttgaactccagtccatggtagccgtccatgaggtgtccagtctggatgacgcggtcgcggatgatctgcatgtcatagtcggtgggcagggtgatctgatattgcatggcgtacatcagcggttctccttggtttcgtgggagtaggtcgtggggatgacgggttcctgccaatcgatggttgacaagtcgtcggcggcttgttggtaggtagggtggatcattggctgtttgagtgcagcgccatgccagtgtctctggccggcgtcgatccagatggattcgcccttggtcaggtgctggggtgcttgtccttcaatatggaccagggcaacgccgcccgtgacgtagaggccctgtcccttggggtg

SEQ ID NO: 307 - DNA, 578 bp, Propionibacterium acnes
  source 1..578: mol_type = genomic DNA
ggcgtgggcggcacgcccggcgtcttccgtggcacgatcggccggatccatggcggcgcgcagctgctgttctgcagccaggcgtccaggtcacggcgggcagcatcgacacccagggcagcctcgacggcttcagggctacgacgctggccgggctggttgaccgcagaccactggtgccgggcgtcgtccagatcatggccggcggcgtcgatgagggcggtggtggcttcggcgcagcatcgcctgatccactccgaacgtgacaggccagctgtctcggcggcactgtcaatgcgcgccaggagagatttcatgggcgctcatctgtagcctccagataggcgttgatgtagcgcagagcctgatccgtcatgtcgatggcggctgcctcggcagacgacacaacgggctgtggatgataagaccacccaacatagacggcgaacatcaatttctcgacagctttcatgaggtccccggcggcaaccgcatccgcctcatcatccgaggagaaccacttcaggtctgaacggctgtacatagcccctaggtcctgatgtgggtcgaggtccttg

SEQ ID NO: 308 - DNA, 2201 bp, Propionibacterium acnes
  source 1..2201: mol_type = genomic DNA
tccgccctgcatatcggggcctcttcataccttcaaaagtgtgaagggaatacagactcttcgactggaattaaaatggtatatggcgtgtccggtccgcacccagctccacgatgcgccatagaggagccataacttcaccaatcgtatacgatatgagtgtaggtgagcatctaccggtggccgacagtcagatacaagcatgggcggatgaagcagaagctgattatgacctcagcatgcttccgccgtctcgacgtggtcgcccaccggtggggaggggcccgggcactgtggtccctgtgcgcttcgacgcggacactctcaaggcgttgtcacaacgagcccctgacgaaggattgaccacgcgttctgacgcgatccgtgctgcggttaaccagtggctcggcctcggctcgtaaacattatcggcgcgacaaccttactgatgacgctgttggttacgccgtagagcacatcttgtactcgtgggcgctcgacgatgccgatgatcctcgttgctggatgatgattcggtgttgacccagctggcctcctcatggagctagttatcctcatctacgacgatggctatgaactcctgatccacgccatgaaagcccgccctcagtatctgagctacttcgctatctagtgttgttgggcgagttgaactcaacttttctccgacgcaagcgccaataaaaggctgatccatccgaataccaccaaacacggctgaagtgtggaacagattcagcaagacagggtgcggtgctcgggtgcgttggggagatgaggatattcaggcttctggcgggatgtggcttgatgacgtccaggatcaccggttcggttttgaaggtgccttgcattaatgtcgacagggtcgtacgactcgaggactggatcgaccagcccgttgcgtctgaagaacttcatccaccccggtggagctccggccgcatactggtgcaacggatcattagcatgggtagcgtgagtatgccttcgatcgtggtcagtgctgtcatcatccaagattctgacgggcggcttctcactgtccgtaaacgaggcgccgaggcattcatgctgccaggcggcaagccggagcccggcgaggactcgcgtcaggcagtagtccgggaagtgcacgaagagctcggcgtcgcattgtcttccgacgacctgcgtcgggtgggagtgttcaccacgcgagcagcgaatgaggccggccatcaggtggtggcgacgattttcacccacaccccggttgcggtgagtgagccagctgctgagatcgagcagattcgttggctcgattggagtgtcgacgccctgcctgatgacctggccccgctgctggtcgaggcagtcatcccgtggctgcggcgccgtatccggtcggtcgctgtattcacgggtgcgaaggatggaaccgaccctcattatcgtgtcgaagcaaccgccttgggccggggtctcgcacacgccgggatcaccctggtttatggcggcgggaaggtcgggatgatgggtgctgttgctgatgcggccctcgctgctggcggcgctgtgatcggagtgatgccgcagcacttggtggacggggagatcgcccatcctagtctgactcacctcgaggtagtgcggactatgcatgagcgcaagcagcggatgagtgacctagctgacgcgttcgtcgcgctacccggcggcggcggaacccttgacgagctattcgaagcatggacatggcagcagctcggtgtacacagcaaacccgtggccttgtacgactcgaccttctgggcaccgctgaccgcgctactcaaccacatgaccatcgaaggcttcatccgccctgaggaccgcgcctcgctcgtgatcgccgataccatacatcagctgatggccgatcttgagggatggaccccaccaccaccgaagtggcgctcgtgacatagaacaaatgattctgactatggctcattgacatctgcgcagcggctactagctccattgacttcaaatcgggccttggccgaggctcggttcaggtggcccggaatggatccccacaaattgaatgctcatgatcgaggtgatgaacgcccactctattgtcctacgcccggttgtatccagcgagcaattgaaggtgctgcgcctgttggtcgaccaggccgagccactca

SEQ ID NO: 309 - DNA, 2334 bp, Propionibacterium acnes
  source 1..2334: mol_type = genomic DNA
cccgcggcgtccgctggggcgagtgcgtgtctgtcatctcatcttttatcgtcatgtttccccttgtcagaggggtctttgcaaagtgacaacgtcaggggtcttgacgacaacatcctcgacaacatcgtggcggtggtctgtgtcttgtcagttcaacgcaccggggaaagaggcaccgctgatgttcaccaccacaaacaccctcaacgatgaatgggaccagattcgcgccatcgagatcgattggcatgactgccctgaactgatgcactgcatcgacgttgatgatgtgttggccgtcattcctgccgcccccgacgccatcttgggctacctcattgcccgggctcagggcggtgacgagttggccacccgcactatcatccaagcgttcacaggcaagcttattttgatggccacggccaccaaggtgcgccgtactaatgacggcttcaatgatctgttggcgggtctgtgggagacgatcatcacttacccgttggatcgtcgccctgacaagatcgctgcgaacctcatcctcgacacgttgcaccgggttacccggttttggcgtgctgattcccccgatgaggaagaggctcacggtctgctgcccttccctgacactctcatcgccccagagcccgatgaggacgtcacagctagccaggccatcgccttggcggtggaccgcaactggattaccgaggacctagcccgcctcatgagccatatttactgtgacggtatgactggagctgatgcgggtcgtctgcatggctgcgctccagctacggtgcggtctcgatgccgtgatggtcgggccgtgttgcagcgcaacgccgagacgatcctggccgtctgctgatccctctcttgctcatgcctgccgccaccctacccctacctgctagaaacatagccatgtctccagcaacgcatctagcatatcttctagcaatttatctagctatgtatatagctgatgatctagctatcatatagctgtgtctccagcccaaatgacagcccaatggcatgcttgccacaggaaggtgcgtcagcctcccgaaatactggaaggagctttagcgtgcaggacatgaccagtcctattgaccgatccccgttcgaccgcactattgcggtgtggaaccacaaaggcggcacgttcaagacgtccgtcgtggcgaacctgggatacctgttcgccgccggtggcaacaaggtgctgctggtcgacatggacccccaagccaatctcgacatcgacttcggtatacccgcaggagaacgtgaacggggcatgggattagccgaggcgctgcgcgaggggacggcccttcccccaccacagcatctcagcgaaaacctccacctggtcagtggcggcccggccctccacgagttcaccgaccccgcatccttagcggccatcatcgaccgagtcaccaccgcacgctacgacctgctagctcaggcccttgccccgctggcctgggactatgacctcatcttcatcgactccgggcctgcccaaactctgctgtcccagaccatccttggagtagcccgctggctggtagtgcccacccgcaccgataacgcctcaatcactggcctcgtcgacgttcaagacgccatcgacggggttgcctcctgcaaccctgaccttcaactactcggcgttgtcctagccggcgtgggggcccgggccacccggatcgccgcagataaacgccacgccatcgacacagtgctgggggcaggaaccgttttcgatgcggtcatccactactccgagaaggtgtccgtgctcgcacgccagcagggcaagaccgtcgccgagctagccaacgagtaccacaacacccagcccgcctacacctacctagctaaaggccagaacatccccaacgtcgccaaggcagccgtcagcatcgaaactgattatctgaggctggccaccgagatcagcgaccgcatgttcaccagcgacgagcaggagcctgatcatgactgacgatccgactccatccgagcagaacaaccccaccagcgacgacatgcgcttggccgaagaatgggccaacagcggccgcacagtgggagccctgccgcgccgtcaacggcctcagcaacccacaccccgcaccaccagccaaccccctgtctcgtcccctgacacaccggctccgaaaaaaccccagaagacccccaccagccagcctggccgtcaacggatcaacgtcaccgtctacgttgtgcccgaactccatgagcggctgcgctcccgatcggcggcgacgggggggacggtctcggatctgg

SEQ ID NO: 310 - DNA, 2280 bp, Propionibacterium acnes
  source 1..2280: mol_type = genomic DNA
gacgccggccaccccaactactccgacccacacggtgaccccagctccggcctctgccggccactcgaccagcgacgagcacccaatccatacggataccgccgcagcggacaaggccagcgacgaggacgccctgtccccaatccaggtgggtttgaccgccagcgtcggactggtgctggtcgccggactgatcaccaccctcaaccgccgctaccggacccggttcacccgccagccccgcggcaaggccatgaccctgcccagcccggacgcccaaactgccgagatagcgctgcgcagcaccggggcgactgacactctgacgatcacctgcctcgaccaggcgctccgcgcgatcggcgcatggtgccaccactgcgggcacccgctgccacccctgctggccgcccgcgtcgatgacgaccggatcgacctgctgctatcccaggcggcccccgaccatcccgaggcggtggagctggccgccgacggatcggtgtggaccctcaccgccgaccggatcgacgacctgctagcccacaccgatgacaaccaagcggctccgtggccgtctctggtcacactgggacgcgacgacgacggcgcccacatcctcatcgacttggaagccgcaggaaccttgcacctgatcgccgatgacgaccaggtcgacgcggccctcgccgcgatcgccgtggaactggccacctgtgactggtccgacgaggtcaacgtcaccctggtcggccaggtgtgcccgggcctagaagacgcactagagtctccgaccctgacccgcgccaccgacgtggacgccctcctcaccaccctggaagctcgcgccgacgaccagcgacacatcctcaccgaaggaagccccctcgccgctcaccgagccgaccccgccatctccgacgggttcgacgccgaagtgatcctcctcgacaccgaactcaccgaagaccaccgcaaccgcctcgccagcctcgtcgaggctcttccccgcgtgtcagtcgccgcggtaacaaccagccccaccagcccagacgaatggtccctcaccctgacaggtgacccactagccgccgacctggctcccctcggctggcacatccacccccaaaccctctcccccgacctgtacaaccgcatggttgaactactcgccaactccgccgccgcagactacgaacccgccagctggtggaaccacgacgccgacgacgagcccaccaccgaccccaccaacgaggaagaatctaccccgagcaggcgagcccgcccgaatatccgcctgaccaccctgaccggcggcatcgacctatccagcgtcgacatcgacgacatcatcgacgaagccaaccaggccctcgacaacaccgaccagaccaccaaccaggttcgcgtcgacaccgaccaacccggcaccgacacccccttccccatcgacgacatcgacccgctgagctccgaccacccggtcctatccatcatcggccaccccgacatcacaggtgccactggaaccgttgggcgctccccgtggcgctgccaacagttggccctctacatcgctgagcatccgggagcatcgggggcgactatcgccgatgatttggggctatcagcgtcgacggtgcgctcgattgctacacacctgcgacactggttgggagccgacgatgccggggtggcttacatgccggcggcgacgcgcggctaccggctcgatgagcggatcgtcacagatgtggacctgatcgacgctgctgtggccggggcaggcattaacaccgctgagacggccacactggtggccattttgaagctgggccgcggacgggtcttcgctggggttcctgactcggaacttcgccagttcagggcgtcgatgtaccacgtggaggcccgcatcgtcgatgctgccctccaagtgacagaccgggccctggaagccggagacttggggctggcccggtgggcgctgacccaagggctactggtgtctcccgatcatgaggacctggtcgccggttgtctgcgcaccgaataccaggccggcaacatggacaaggtcgccgagctagttgatcacctgtcggctaccgcacgccgactgggcgtcgacctcaacgaggacaccacccggatcatcgatacggtcacccacgccgacaggagagcatcatgatctcccctgcactcatctccgtcaggaaggtccctatgcaccattatcgtcttggtatcggcactgccctcatcgccgtagcagcc

SEQ ID NO: 311 - DNA, 594 bp, Propionibacterium acnes
  source 1..594: mol_type = genomic DNA
gctgagaaaaattttgggtccgccctgcatatcggggcctcttcataccttcaaaagtgtgaagggaatacagactcttcgactggaattaaaatggtatatggcgtgtccggtccgcacccagctccacgatgcgccatagaggagccataacttcaccaatcgtatacgattggagtgtaggtgagcatctaccggtggccgacagtcagatacaagcatgggcggatgaagcagaagctgattatgacctcagcatgcttccgccgtctcgacgtggtcgcccaccggtggggaggggcccgggcactgtggtccctgtgcgcttcgacgcggacactctcaaggcgttgtcacaacgagcccctgacgaaggattgaccacgcgttctgacgcgatccgtgctgcggtttaaccagtggctcggcctcggctcgtaaacattatcggcgcgacaaccttactgatgacgctgttggttacgccgtagagcacatcttgtactcgtgggcgctcgacgatgccgatgatcctcgttgctggatgatgattcggtgttgacccagctggcctcctcatggagctagttatcc

SEQ ID NO: 312 - DNA, 2594 bp, Propionibacterium acnes
  source 1..2594: mol_type = genomic DNA
ttggtattggtaggcgatggtgtcaccggttttgttgcggatgacgtcgaagccttcgatgtcggaggggatgtcgtcggcgtcgtagacgacggtggtggtgacggggttggaggccgacatttggccgatggtcacgcgcagcatgtttttcaacgcggaggtgaggattgtcgtggcggtggggtttttgtctgcccagcgtttctcggcgatgtcgatcatgtcttggatggttttgacccatcctcggatgggatcgactttggtcagtttgatcccttcgaggaactcgatgggctgggtgatgggcccatctggtccggcttcggtgtcccagccttcgtcgatggctagtttcagttcggcggtatcgacccatgtttcgtgggtggtgccgggcacgttgggccaaaaccatcctgctcgtcctttggtgcgtttgaccggtagtaggccgatgtcgtcccaccaggatggcacggtgaagcggatgtggtagcgggccgggtgccaggggttgttggtgaacaggtcgcgggcttcggtggcgctgagcagagtggcgggtgcggcaccgatctctccggtcactgatccggcatacatgaatcggccgtcgatgtacacgaagttagggatagggccggcaggcacggtggggcgccagcccttttcgcggtcctcggggttgccgtcgtcgacgcatagttcgtagcggtgctgaggggaggtgtgttggatgagtgcgcccagttcggggtccatcggctccatgcgataggactcgggggtccgtagcttccagaggttgattccttctgctccggggcggtccatgagggcccagtcgcggtcgattctggtggcgatgatgtgggttaattcgcgccatgcccagcgggcctggattggggtgagggtctggccagggaaccattcatcagcgaccagaatgtcgaggttgcggtcggtttctttgtgggtgaaccggcctcgggcgggccgcccggacagcatgaacaggccccgcacgtgccagtcctggttgaactcgcgggtgtgagcgggggtgtcaggcagcagccaggattgaggctggtcggggatgttaccgcagacgatcaggcgtcgggcgttgtggtgtagcgcggttgttagcaggtctgacagggtcgcgtgcttggtgcgtcgtccccccagcactggcaggatctcgtttccggccgcgtcgactccccgggcggtgtcgatgtctagccacactgtttcggggtcgggggccgatgtggggcgggacggcgctgctcctggtcgtctctcatggtttcctcctttgggccagggagcggccggcgtcgagggcgttcatgcgctcgcgttgttcttcgcgtagttggtagacccggcctcgtgacactcctgctgcctcggcgatggtggtggccggcaggtggccgatggcggcagcgtcggcaaggacgtcacgccaggccaggtcaatggttcccagctgggctagagcttcgtcgcggcggcgggtggcatcagccactacggaggcccaccctgtggggtggatggtcttgacgacgattcggttgtggcggatggggccccatgcatcagcggggacttgccagccgtgattggcggcggactcggtgatcttgaggcgtcgctcaggtgcgcgggtgcgggcagtgacgtcggtgttccaggtctggactggtacccacgtcccctctcggatgcgttcgatgacgcacgtggtgacctcgtcggtgactgtgatgaccagacgataatctttcccgtctggggtggttcggtagctgggcatgtcaccctcccctatctgtcaaatgagctagacacagtgtctatttaatttgacgcaaagtcaagtgtgctagacgcctttgtgtggatccgcccgcccagacaggcactcacgtctcatgacccgccgcgacgtcttaacgaaaccaaaccgcttatagaaccgctccgcagcgggcccggagggcttcagttcgagggtgagaccgtgctcgtcggcccattggcagacttgtgtgaggatctgtgagccgtggccttgagtgtgggggacggcgtggacgcacatgagcatggggccgtggcggcgcgctggcggggccacgtaggctccgccatgccagtccggtgtggtctgccagcttcgccatgtcgcggtacgccagtggtgggcttcgagggccaccatgatcaccgcgacgacgacgagcgttgcggccccgatcatggccagctcaccctgaccaggccagttcccgcagatgatccagtctcttaacgcccagatgatcgcggcttccacgcctgctgcgatcgggatgagcaaggcagaacgaaggtgtcctgccatgatctcggtgatctcgctgcgatgccatgacaaggagaattcccacgactcttgaatcatgctgatgtgtgaacggcttcttcggcttcgccctgccatagtttctccaaacgacgctcagccagctcgtcgggacacggcgacagcctgccgcactcggagcagaccccgaagtggcgcg

SEQ ID NO: 313 - DNA, 2383 bp, Propionibacterium acnes
  source 1..2383: mol_type = genomic DNA
tggttgtcgaccacaacgatggttcccggtcaacgctgccgccggtggccgactcggatgccgagctggaatcccagatcgcccggatggcgaggaatgcgaccccgcggcgagccttcgacgccgatcacaccgatgtgacgatcatgcaccaacagaagttccgtatccacgcgatctcagcggaagtgtcattgcaaccgtcggtggtcatccgccaacatttgctcacccaaatcagtctgggggacctgtcacatcgcggaatgatgccggtggaagtggcccggttcctcgatgaggcggtacaagctggcaagtccatcgtggtcgccggcgagcagggtgcaggcaagacgacgtttttacgagcgttgatccacgccattccgatgcgggagcggttcgccacgttggagaccgatcaggagttgttcgctcatctgatgcctggccgggaaaacacgctggtgctgttcgcccgtgatggtaacggcgaggtggatccggcgactggcacccagcacggcgctatcgagatcgcccagctgattcctcctagcctgcgccaggcgttaactagggtcattgtcggtgaggtgcgcggcaatgaggcctcggccatgttccaggccatgcagtcgggtacaggcaccatgagcagtatccactccccgcgagcctctgaggtgccgtcccggctagcccaaatgatttcgatgggcccggtctacgatctggatcaggccatgctgcagatcggtcattcgatcgactacatcgtctttgttcgtaagcgtgacctgcctgatgggagccggctgcgatttgttgagcagatccgttcagtctcgcctggtgattcgacaactcccagtcttggcgaggtgtacacggctgactcgtggacaggccagccgcttacgccactcatgcccggatcggccgccgacgagctgtctcacttcgcccgagacctggattactgcgaggcccactcatgaacactcccgcactaaccagcgccctcatcgtgaccgggttggggctgatcctggccatcgacgggctggtcccggcgccgcctcgacctggggccccgctgagcccggaccaaaggtgggccaggctcacccaccgtcccacaggagcggccgggcgccgccgggacctgcgctgggggctggctgttctcgtcggcgtcgtgctgtttgtgctcaccgggtgggtcgctgcgctggcgttgggccccatcatcgtgctgctggcccccaccctgctgggggcggccccaccaaccgacatcccgctgatggaggcgctggatcggtgggtgcgtcaggtcgctgcggtgctgccacaggggcgagacatcatcacagcggtgcggatctcacggccgcgggccccgaagctgatcgccgggtcggtggatcaactggtgtcccggttggatggccgtatggagccgagggaggcgttccagcggatggccgacgagctggactcggctgaggctgacgcggtgctggcctcactagcgttggcggccactcacccgcggggagcctcgacaacgttgaaggctattgctggcaacatccaacagcggttgaaagtgctgcggcaggtggaggctgagcggtctaagccgcgtaactcggtgcgccagatcacactggtcacgatcgccatgttcggggggctgctcgtgatcggacggtcgtttctggccccgctggcgacccctcccggtcaggtgctggtggccgtggcggtggtcatgtatgtcatcgcactagtgcagatgtatcggatggcgcggccccgtcgacgcacccggatcatggtcaggaggacccgatgaccattactgctttgtccctgctggccggggccatcgtcactgtcggactgctggtcatcgtggcagcgttccgcccagccccaggccctgacctggttgccgctctggaggtggtgtcgggtcgcacctcaagcgtcgccgagaacgtcgaccagacccggatcgggcggataggtcgcagcgtgacccgcacattccatgtgtcggtgtccccggccatgcgggccgcactgcgactccaaggcacgacccccgaagcgttctacggtcgacgcctgatctgcgcactgatcggggcgatcctgccgtggctgctcaacgcggtagccatcgcggtaggggcgaattccccgaacctactcatcccttcggcgctgtgtgtggcgttagctggcgctggatggatgctgccggcagcacggttgaaggctgcggccgggcccaccaacgatgactcgttcgaagcgctgctggtattcatcgatttggtcgtgctggaacggctcgccaacgaaa

SEQ ID NO: 314 - DNA, 2238 bp, Propionibacterium acnes
  source 1..2238: mol_type = genomic DNA
gacgccggccaccccaactactccgacccacacggtgaccccagctccggcctctgccggccactcgaccagcgacgagcacccaatccatacggataccgccacagcggacaaggccagcgacgaggacgccctgtccccaatccaggtgggcttgaccgccagcgtcggactggtgctggtcgccggactgatcaccaccctcaaccgccgctaccggacccggttcacccgccagccccgcggcaaggccatgaccctgcccagcccggacgcccaaactgccgagatagcgctgcgcagcaccggggcgactgacactctgacgatcacctgcctcgaccaggcgctccgcgcgatcggcgcatggtgccaccactgcgggcacccgctgccacccctgctggccgcccgcgtcgatgacgaccggatcgacctgctgctatcccaggcggcccccgaccatcccgaggcggtggagctggccgccgacggatcggtgtggaccctcaccgccgaccggatcgacgacctgctagcccacaccgatgacaaccaagcggctccgtggccgtctctggtcacactgggacgcgacgacgacggcgcccacatcctcatcgacttggaagccgcaggaaccttgcacctgatcgccgatgacgaccaggtcgacgcggccctcgccgcgatcgccgtggaactggccacctgtgactggtccgacgaggtcaacgtcaccctggtcggccaggtgtgcccgggcctagaagacgcactagagtctccgaccctgacccgcgccaccgacgtggacgccctcctcaccaccctggaagctcgcgccgacgaccagcgacacatcctcaccgaaggaagccccctcgccgctcaccgagccgaccccgccatctccgacgggttcgacgccgaagtgatcctcctcgacaccgaactcaccgaagaccaccgcaaccgcctcgccagcctcgtcgaggctcttccccgcgtgtcagtcgccgcggtaacaaccagccccaccagcccagacgaatggtccctcaccctgacaggtgacccactagccgccgacgtggctcccctcggctggcacatccacccccaaaccctctcccccgacctgtacaaccgcatggttgaactactcgccaactccgccgccgcagactacgaacccgccagctggtggaaccacgacgccgacgacgagcccaccaccgaccccaccaacgaggaagaatctaccccgagcaggcgagcccgcccgaatatccgcctgaccaccctgaccggcggcatcgacctatccagcgtcgacatcgacgacatcatcgacgaagccaaccaggccctcgacaacaccgaccaggccaccaaccaggttcgtgtcgacaccgaccaacccggcaccgacacccccttccccatcgacgacatcgacccgctgagctccgaccatccggtcctatccatcatcggccaccccgacatcacaggtgccactggaaccgttgggcgctccccgtggcgctgccaacagttggccctctacatcgctgagcatccgggggtatcgggggcgactatcgccgatgatttggggctatcagcgtcgacggtgcgctcgattgctacacacctgcgacactggttgggagccgacgatgccggggtggcttacatgccggcggcgacgcgcggctaccggctcgatgagcggatcgtcacagatgtggacctgatcgacgctgctgtggccggggcaggcattaacaccgctgagacggccacactggtggccattttgaagctgggccgcggacgggtcttcgctggggttcctgactcggaacttcgccagttcagggcgtcgatgtaccacgtggaggcccgcatcgttgatgcggctcttcaggtgacggatcgggctctggaagccggggacttggggctggcccggtgggcgttgacccaagggctactggtgtctcccgatcatgaggacctggtcgccggttgtctgcgcaccgagtaccaggccggcaacatggacaaggtttccgagctggtcgatcacctgtcggctaccgcacgacgcctgggcgtcgatttgagcgccgacaccacccggatcatcgatacggtcacccacgccgacaggagagcgtcatgatctcccctgcactcatctccgtcaggaaggttcctatgcaccat

SEQ ID NO: 315 - DNA, 2099 bp, Propionibacterium acnes
  source 1..2099: mol_type = genomic DNA
gacgccggccaccccaactactccgacccacacggtgaccccagctccggcctctgccggccactcgaccagcgacgagcacccactccatacggataccgccgcagcggacaaggccagcaacgaggacgccctgtccccaatccaggtgggtttgaccgccagcgtcggactggtgctggtcgccggactgatcaccaccctcaaccgccgctaccggacccggttcacccgccagccccgcggcaaggccatgaccctgcccagcccggacgcccaaactgccgagatagcgctgcgcagcaccggggcgactgacactctgacgatcacctgcctcgaccaggcgctccgcgcgatcggcgcatggtgccaccactgcgggcacccgctgccacccctgctggccgcccgcgtcgatgacgaccggatcgacctgctgctatcccaggcggcccccgaccatcccgaggcggtggagctggccgccgacggatcggtgtggaccctcaccgccgaccggatcgacgacctgctagcccacaccgatgacaaccaagcggctccgtggccgtctctggtcacactgggacgcgacgacgacggcgcccacatcctcatcgacttggaagccgcaggaaccttgcacctgatcgccgatgacgaccaggtcgacgcggccctcgccgcgatcgccgtggaactggccacctgcgactggtccgacgaagtcaacgtcaccctcgtcggccaggtgtgcccgggcctagaagacgcactagagtctccgaccctgacccgcgccaccgacgtggacaccctcctcaccaccctagaagctcgcgccgacgaccagcgacacatcctcaccgaaggaaaccccctcgccgctcaccgagccgaccccgccatctccgacgggttcgacgccgaagtgatcctcctcgacaccgaactcaccgaagaccaccgcaaccgcctcgccagcctcgtcgaggctcttccccgcgtgtcagtcgccgcggtaacaaccagccccaccagcccagacgaatggtccctcaccctgacaggtgacccactagccgccgacctggctcccctcggctggcacatccacccccaaaccctctcccccgacctgtacaaccgcatggttgaactactcgccaactccgccgccgcagactacgaacccgccagctggtggaaccacgacgccgacgacgagcccaccaccgaccccaccaacgaggaagaatctaccccgagcaggcgagcccgcccgaatatccgcctgaccaccctgaccggcggcatcgacctatccagcgtcgacatcgacgacatcatcgacgaagccaaccaggccctcgacaacaccgaccagaccaccaaccagaccaccaaccaggttcgcgtcgacaccgaccaacccggcaccgacacccccttccccatcgacgacatcgacccgctgagctccgaccacccggtcctatccatcatcggccaccccgacatcacaggtgccgctggaaccgttgggcgctccccgtggcgctgccaacagttggccctctacatcgctgagcatccgggagcatcgggggcgactatcgccgatgatttggggctatcagcgtcgacggtgcgctcgattgctacacacctgcgacactggttgggagccgacgatgccggggtggcttacatgccggcggcgacgcgcggctaccggctcgatgagcggatcgtcacagatgtggacctgatcgacgctgctgtggccggggcaggcattaacaccgctgagacggccacactggtggccattttgaagctgggccgcggacgggtcttcgctggggttcctgactcggaacttcgccagttcagggcgtcgatgtaccacgtggaggcccgcatcgtcgatgctgccctccaagtgacagaccgggccctggaagccggagacctggggctggcccggtgggcgctgacccaagggctactggtgtctcccgatcatgaggacctggtcgccggttgtctgcgcaccgaataccaggccggcaacatggacaaggttgccgagc

SEQ ID NO: 316 - DNA, 2126 bp, Propionibacterium acnes
  source 1..2126: mol_type = genomic DNA
tgggctgtagaggaggtcgatgtcgcgggcagggtcgtcgggttcttcggttacctcgggtggggtcgatctggctgtctcggtgtcgtcggccaggtcggctcccaggatgcgttcccattcggggctggttttcttgcccgctgaggccatcgtctcgtcgatctgttcgtcagtgggccacacaaatttctttttggtccaggtcgtggtgtcgggtcgcagctgatccagcagttccaggtcttgcggggagtgggccttgcgggggtcgggggtgtagaagaattggacttccttgggggctgattcgccggataggtaggtgccgcggccgcgtttgccgaacgggattcccacgccgacgtgttcggagccgaacatcatgcgggctccgtcagcggacaggggtccggtggcggcacgcccggagaagttgtctcggatttcgccgcccaggaactcggcgtcggggcgttgggtccccagatcgacgtggatacggcaggcggctgccatgcgcagcagggagccgatccagccgaaaacggggcattctccgggcatcccagagaccttgatcgttgaccaccagtttttcgcgttgccgtagaactggcggtactcgtcgatgaggaccagcacgcgggtgaagtcggtctcgcgggccccttcttcttcgatgcggcggtagcggtcctccatgagagaccacagccagtggatgagggcgacctggtcggggacggtagtggcgaccatctcgatgttgggccactcccgcaggcccaggtactcgatgcgtttagggtcgatgacgaagacgcgccagttgcggcgggcaccctcgacggcgtcgccgatcatggacaccgtttttccggtacgggtgcggccggccttgagctggtgggccatgacaccggagatgtcccagaaacaggtgttgccgtcctcgtcgacggcctgggggattttctcccagtctggggagtctgggcccggaagggccacgggtcggggcaccatcgagggcagggggtggcggcgggtgacggtgatggtgtcgtgttccaggtcgaagtcgctgcgccactggccgagcatcatcgccgaggtcaccgcggccaggcgcaattggatgttcgggctggacaaatgggcgccacgttggtggtgaatggtgaagccgtccaggttcccccgatcggttttccaggaatcgacggtgaccgccgacccatagatctgagtggctacttctttagcccgttccttgtctcggtccagatcggttttgtcagggtcaggggtcggggcgcggtattgcaggacgaaccggcccgccgggatcgttgcggatgtcaccgtgaactctgccggcgaccaggcagccgcggccgcctgggtgagggccattggcatggtctcgacggcagcctcctcgggggggatggtgagggtcaggcgtcgcggatgcgtcttcttgcgattccatgtgactttctgcctcaccggcaccttcgccgccgactgaatggctaggcgagctgattcggcagtttcggtacgccggccagcgcgtagcgcccgtcgtgcgtgaaggctgcccaccacagcacagcccatacacggcagccaccagcgcggatcagcggctgctgcatagcccccggtagctagtaccgcacctgaccagccggccgcgatacttttccacgccggtttcgcaccaacagtcggggcagacgctggccgcttcgagaccgaggagggacgagacaagggagtgctggtcatgccgcggcctccttgtggcaggtcatttcacaggcatgccggccagcgatgatgccgtggcgcaccgccccggtagccgcatagaccgcgcacaactcaaacacggggcacccatcgcaggccgccgggttcatgctttctttgtcccacgatggtgggtcatcggtgcacggcacggccaggccatcctgttgagcggcgctgatagcggtgaataggcgcagctgggcgcgaacttggtctggggtcaggttgacggtgcgggctacacgcatggggttccttcctcttcaccagtgaaggttccctagacccggccgatgtgc

SEQ ID NO: 317 - DNA, 1956 bp, Propionibacterium acnes
  source 1..1956: mol_type = genomic DNA
ccgccgtctcgacgtggtcgcccaccggtggggaggggcccgggcactgtggtccctgtgcgcttcgacgcggacactctcaaggcgttgtcacaacgagcccatgacgaaggattgaccacgcgttctgacgcgatccgtgctgcggttaaccagtggctcggcctcggctcgtaaacattatcggcgcgacaaccttactgatgacgctgttggttacgccgtagagcacatcttgtactcgtgggcgctcgacgatgctgatgatcctcgttgctggatgatgattcggtgttgacccagctggcctcctcatggagctagttatcctcatctacgacgatggctatgaactcctgatccacgccatgaaagcccgccctcagtatctgagctacttcgctatctagtgttgttgggcgagttgaactcaacttttctccgacgcaagcgccaataaaaggctgatccatccgaataccaccaaacacggctgaagtgtggaacagattcagcaagacagggtgcggtgctcgggtgcgttggggagatgaggatattcaggcttctggcgggatgtggcttgatgacgtccaggatcaccggttcggttttgaaggtgccttgcattaatgtcgacagggtcgtacgactcgaggactggatcgaccagcccgttgcgtctgaagaacttcatccaccccggtggagctccggccgcgtactggtgcaacggatcattagcatgggtagcgtgagtatgccttcgatcgtggtcagtgctgtcatcatccaagattctgacgggcggcttctcactgtccgtaaacgaggcgccgaggcattcatgctgccaggcggcaagccggagcccggcgagaactcgcgtcaggcagtagtccgggaagtgcacgaagagctcggcgtcgcattgtcttccgacgacctgcgtcgggtgggagtgttcaccacgcgagcagcgaatgaggccggccatcaggtggtggcgacgattttcacccacaccccggttgcggtgagtgagccagctgctgagatcgagcagattcgttggctcgattggagtgtcgacgccctgcctgatgacctggccccgctgctggtcgaggcagtcatcccgtggctgcggcgccgtatccggtcggtcgctgtattcacgggtgcgaaggatggaaccgaccctcattatcgtgtcgaagcaaccgccttgggccggggtctcgcacacgccgggatcaccctggtttatggcggcgggaaggtcgggatgatgggtgctgttgctgatgcggccctcgctgctggcggcgctgtgatcggagtgatgccgcagcacttggtggacggggagatcgcccatcctagtctgactcacctcgaggtagtgcggactatgcatgagcgcaagcagcggatgagtgacctagctgacgcgttcgtcgcgctacccggcggcggcggaacccttgacgagctattcgaagcatggacatggcagcagctcggtgtacacagcaaacccgtggccttgtacgactcgaccttctgggcaccgctgaccgcgctactcaaccacatgaccatcgaaggcttcatccgccctgaggaccgcgcctcgctcgtgatcgccgataccatacatcagctgatggccgatcttgagggatggaccccaccaccaccgaagtggcgctcgtgacatagaacaaatgattctgactatggctcattgacatctgcgcagcggctactagctccattgacttcaaatcgggccttggccgaggctcggttcaggtggcccggaatggatccccacaaattgaatgctcatgatcgaggtgatgaacgcccactctattgtcctacgcccggttgtatccagcgagcaattgaaggtgctgcgcctgttggtcgaccaggccgagccactca

SEQ ID NO: 318 - DNA, 2383 bp, Propionibacterium acnes
  source 1..2383: mol_type = genomic DNA
ttggtattggtaggcgatggtgtcaccggttttgttgcggatgacgtcgaagccttcgatgtcggaggggatgtcgtcggcgtcgtagacgacggtggtggtgacggggttggaggccgacatttggccgatggtcacgcgcagcatgtttttcaacgcggaggtgaggattgtcgtggcggtggggtttttgtctgcccagcgtttctcggcgatgtcgatcatgtcttggatggttttgacccatcctcggatgggatcgactttggtcagtttgatcccttcgaggaactcgatgggctgggtgatgggcccatctggtccggcttcggtgtcccagccttcgtcgatggctagtttcagttcggcggtatcgacccatgtttcgtgggtggtgccgggcacgttgggccaaaaccatcctgctcgtcctttggtgcgtttgaccggtagtaggccgatgtcgtcccaccaggatggcacggtgaagcggatgtggtagcgggccgggtgccaggggttgttggtgaacaggtcgcgggcttcggtggcgctgagcagagtggcgggtgcggcaccgatctctccggtcactgatccggcatacatgaatcggccgtcgatgtacacgaagttagggatagggccggcaggcacggtggggcgccagcccttttcgcggtcctcggggttgccgtcgtcgacgcatagttcgtagcggtgctgaggggaggtgtgttggatgagtgcgcccagttcggggtccatcggctccatgcgataggactcgggggtccgtagcttccagaggttgattccttctgctccggggcggtccatgagggcccagtcgcggtcgattctggtggcgatgatgtgggttaattcgcgccatgcccagcgggcctggattggggtgagggtctggccagggaaccattcatcagcgaccagaatgtcgaggttgcggtcggtttctttgtgggtgaaccggcctcgggcgggccgcccggacagcatgaacaggccccgcacgtgccagtcctggttgaactcgcgggtgtgagcgggggtgtcaggcagcagccaggattgaggctggtcggggatgttaccgcagacgatcaggcgtcgggcgttgtggtgtagcgcggttgttagcaggtctgacagggtcgcgtgcttggtgcgtcgtccccccagcactggcaggatctcgtttccggccgcgtcgactccccgggcggtgtcgatgtctagccacactgtttcggggtcggggggccgatgtggggcgggacggcgctgctcctggtcgtctctcatggtttcctcctttgggccagggagcggccggcgtcgagggcgttcatgcgctcgcgttgttcttcgcgtagttggtagacccggcctcgtgacactcctgctgcctcggcgatggtggtggccggcaggtggccgatggcggcagcgtcggcaaggacgtcacgccaggccaggtcaatggttcccagctgggctagagcttcgtcgcggcggcgggtggcatcagccactacggaggcccaccctgtggggtggatggtcttgacgacgattcggttgtggcggatggggccccatgcatcagcggggacttgccagccgtgattggcggcggactcggtgatcttgaggcgtcgctcaggtgcgcgggtgcgggcagtgacgtcggtgttccaggtctggactggtacccacgtcccctctcgggcgcgttcgatgacgcacgtggtgacctcgtcggtaaccgtgatgaccagacgataatctttcccgtctggggtggttcggtagctgggcatgtcaccctcccctatctgtcaaatgagctagacacagtgtctatttaatttgacgcaaagtcaagtgtgctagacgcctttgtgtggatccgcccgcccagacaggcactcacgtctcatgacccgccgcgacgtcttaacgaaaccaaaccgcttatagaaccgctccgcagcgggcccggagggcttcagttcgagggtgagaccgtgctggtcggcccattggcagacttgtgtgaggatctgtgagccgtggccttgagtgtgggggacggcgtggacgcacatgagcatggggccgtggcggcgcgctggcggggccacgtaggctccgccatgccagtccggtgtggtctgccagcttcgccatgtcgcggtacgccagtggtgggcttcgagggccaccatgatcaccgcgacgacgacgagcgttgcggccccgatcatggccagctcaccctgaccaggccagttcccgcagatgatccagtctcttaacgcccagatgatcgcggcttccacgcctgctgcgatcggga

SEQ ID NO: 319 - DNA, 718 bp, Propionibacterium acnes
  source 1..718: mol_type = genomic DNA
ccggggccctgctgctggtgtgggacgtcaccgttttgaccgggcccactctcggccaccgcgtgcgtcctctcagtaaggacgccgagctgactgcccggcgctggctcgaccaggtcgccgacaaccccggcttcctcgacacccttatcgaggccgcccgcatcaccgatggatggcatcacgcgacgcctccgcacattcaggccccttaccggacccttcatcagtgaacggaggtacaacgacatgaccagcgacattgacattgaccggacccacaaacccgacgaccgcgccgaggctcctctttaccggtcctgggccaggagactcgtgcacgtctccgggatgccctggcgtatcgtcgccgccttggccggggtctcccccacctccatgcaccggcttctattcggccgcaacggtcgacccgtggaatggatcggcatcaatgatgctcgcgccctgatggatatcggcatcgatgatctcgcctcagcgtccaccgaccgtatcccggcccgcgaatcccgcgagctgttggtagccctgcacaccctcggctggaccgatgagcatctaagccgctggctgaccagtcccgacctcgacctggccaccacccccaaggccctctacgtcacccggctatccgccgcccgcatccaggccacctacgacatgctcatcagccagcccgtccgccgctgcggcc

SEQ ID NO: 320 - DNA, 2014 bp, Propionibacterium acnes
  source 1..2014: mol_type = genomic DNA
ccggagtatctggacaaggccgtgctcactgcgttgtatcccgatgggttgcccttcgacgaggacaccgaggagccgggcgagaatgccgggcaggaggagcttgcgatgactggatgagcccgaacatggttgaaggccgccccgccaggcgaccttcaatcaatggtttcggttgtcagctgcagccacccttgccaggtgctgtggttcttctccagaggaggagggaccgccatgaagacccagaagatctagaagatccaaaagaaccggtttcggctgttgcttcggtcttcatggtagctgatagcccgcgtcgttggaagtgcgacgacgccgatcctcatcggtatcgcaccctgttccagggtcgagaatgtgaaggattaacaaccatgacaagtcatgagacgccctccctgagggcgtcatgaccgctttaattcaagctctgccgacagctgaactgtctgctggacctggtgctagcagtccagctagaccctctgctgagggcttcatcaagattcatcacgaccttattagtgcgggcgtgtcgggtaacgcgatggcgttgttcgtcgcgttacgtaaccagcccggctgtgatcagtggacccgtcactcgtacctgcggctagcccaatggtgcggctgggatgggctgtcggaggcggcgggctgtaagcgggtgcagcgggccgctgctgagctcgctagcggtggttggctggaatcgcgggtcggccatgatcgtcgcaccgctaagacgctggtgtggcatcggttgaccagccccgacaccgaccgctgggagcaattgccgcggattgtgtgggcgaggatctgccagatcgccggggagacgtcgggagagtgggtgaggcattggctggtgtggcggatgctggccggtcgtactggtgtggctcaggcccctacgtccatcgtggctcggttcctgggctgttcttcgcgccaggtctctcatatccgtggggctctcgttgatgccggtctgctcggctgtgacgaggtctcgggggcggcgagccgggtgtggttcccctcgatggccgaggagtgtgcagcggatcgtgaggtggtcgatggggccgtcgtcgatgctgaggtgggctctggtgaaggtgtcgaggagggcggggaacccctgtcgattttgtccacccacccctgtcgattttgtccacccacccctgtcgattttgtccgccaagtattagacaaaccattagacagtgaattagaccctgggtcgcgtcagcgtgttagctcaccaacgcgcgcgcgtgcggcggccgagccgccgaagccaaagaaacccacaccaccaacgcctgaaccagcagcccccgcttcagacagtcctgtgtcagcgcacgctgatgaggctgccgagttggcgtggcagttcgtggggtggtgtcctcagctggtaggggcaccgaagaaggtgcgtggccagctccgtcagctggtcgctgccgagatccgccggaatccgggctggctggatgcgccagcgttggaggttgttgcccagcgggtacgtgctgaaggtgcgctgggggtccagcactgcgagattgtgcgagccgagctgcacggggtgatcgccgaccagaaggccgcccccgcccgccccgacgccctgcacgcgcgggagcccaagtggtgggacgacgtgtactacgaaggaaacacaaccgtgtggacgtacgactctgacgaaaccagtgacgacgacgaggcgtggaaccggtcgcaggtatgtcatgttgctgagcgtgacgacatggctggcgggattgctaccaacctgctggcctcccacgctgatgatccgatggcctggctgactcgccgtcaaaccatgctgatggctcgtttcccccacgcccagaacgaggtcaccgcgatgtgccaaatcgtgcgcaccgccctggaggccgacctggccgccggaacccggtgggaggaccgatgaggg

SEQ ID NO: 321 - DNA, 1950 bp, Propionibacterium acnes
  source 1..1950: mol_type = genomic DNA
tcggtgtccccggccatgcgggccgcactgcgactccaaggcacgacccccgaagcgttctacggtcgacgcctgatctgcgcactgatcggggcgatcctgccgtggctgctcaacgcggtagccatcgcggtaggggcgaattccccgaacctactcatcccttcggcgctgtgtgtggcgttagctggcgctggatggatgctgccggcagcacggttgaaggctgcggccgggcccaccaacgatgactcgttcgaagcgctgctggtattcatcgatttggtcgtgctggaacggctcgccaacgaaacctccgtcgacgcgctcaccaatgcggcaaacatgtcggactcgccgctattcgtccagatccgtcaagtcctcaaccgtgcctccctggaaaacgtcgacccgtggaacgggctagaccggctagccgaggacatcaaactgcccgaactcaccgatgtggtctccatcgcccgcctccaaaacgaaggcgcctccctcgtcgacagtttccgggcccgagtcgccgagttacgcgacgcctacctgctgcgcctgcaacaagaatccaccgccatcacccagcggcttggtttgtggacgatcctgcaagccggctcggtcatgctcatcttgctgggggcggccgccctcacactcatcacagccggataaaccgacaccgtgtcgagcccccatatgggccgcgaacctttcataatgatgcctgtaagcaccacaatattgatcacaacctaacaatgaaggagaaatcatgatgaccgatctcgacctggctaaaaaacagatcacctggctggcggcgcacctgcgttcccggatcgttgacgagcgtggcggtggtagctctaccgtggagacactgatttggattggtgtcatcgtggcgctggtgattggtgtgggcgtcggggtgacggcctatatcaggtcgaagatgcctcactgacgacgatgcgtagcaggttcacaactgatcagcgtggcggtggtagcgcgtcggtggggatgctcctgctgatgcctgcgatcatgctgctggcattcggtgggatcgaggtcgggatgtggtgtcacgcccatcagtcgaccatcgcggcagcccaaagcgccgcggaagctcagcgtgtcgtccatccggtcccggggtcggcacaggaggcagcctcgcagatcactagtcatggcggggtgcgtgatacccggatatcggtcagtgatgacggggccactgtcacggtgaccgtggtgggccgggccccatcgatgctggggctgcatcttcctgctgtgtcgtcgacagcgtcgatgcccaaggagcgcctgtcgtgaggcgaagtgagcgcggcggagcaagtctaagcgtcgaggtgctcatgtgggcgccgatcgcgctggtgatcatcgggtttgttgtgggtatcggccggatgtcgatggcccaggacgcggtgagtggcgcggcgggtgctgcggcccgtgcggcgtcgttggagcgtgatggacagtcggctcagtctgcggcgcagcaggcggcgtcggcgaacctgtcgtccggtgggctggcatgtgcgccgagtgtgagcgtggacacgtcagtgtttgcccgtcctgccgggcaggcgggcacggttcacgccacggtcacgtgtgtcacctcgctgggtcttggattcgggtcccggacggtgcacgcaacggggtctgccccggtagacacctatcgggaaaggagaggctgagatggcccgcgatgagcgtggtggcggctcggtgtcggtgtggatgctgctcatggtgccggtgattctggtcatggccggcctggtttttgacgggtcccgtcagatatcggcaacccaggcggcccaggacgcggcggttgcggcatcccgcgccggaactgatgcggcagcg

SEQ ID NO: 322 - DNA, 2060 bp, Propionibacterium acnes
  source 1..2060: mol_type = genomic DNA
gcgagccacgaccatcgccaagctgaatggagagcgagcatgagcaccacccctgccgggttcgacttcgacgctctggccgagtgggccgagagcgatgaggcgacccacaccccgcaaaccagccccgtgttccggggcaaggacgccgcgcgcgccagccgcgcattcctcggccgaggacggcccaccctcggcgcggaccacgccaccggcgagggccggtcgccccgccgtcaggtacggctcgacgcacgcaccaacgcgcgactcgacgcctacgcagccgcaaccggcaccagcgcctcccagatcatccgcgacgccctcgctgactacctgcccgcctgatcccaccccaatccactcgggcgcctgtcagtgccccctcttctgggtggtggtccggggcgtcaccgccccggaccagttggggagtcatctcagttgaaataagcgattagtgatacgcccctcctgctttccggtgctgtcatgagcgtctgacaacagcgacacctcggggcagccgacggacagtcctctggctgccgctctgatcccatgcccacggcacgaaggtgtcggacagctcggtctcatcatgtgcccaaatagcgtcgtgggcctgtcgccaagcttctcgggagccccacacgggcacgaccgggccacaccggtgtcctggtctccagtgtcgcgacactgtcgatttcggtacgtgcaatgcggcggcggtttgacggatcgacatcccagactcccgcgcgtcccagatcgccatgtggagagtatttgcctccagtgcggccgccacacttgcacgctctcgcgcacgctcgaatgcccgcctagtgctctcaaatgtcgtcacgacgcctccccctgaaaatactcagggtgtcccacggtgggacaccctgagtatttcataccccaactcgcctcaccacacgtcgacctcgacaccgatcaagcgacccgtatcagcgacattgccgtaccgctgccccgcctggtcctccagccacgacaacgcatcccgaaacagcccgacgtcttccaaagctaaaccacagtcgtagccgcccttgtcccccaaccgcaccatctggcgctcccggtggcctccctcgtcgacctcgatccacagtttcgcgtgcatccgctggcctcggccctctgacaggatctcggtgagcaggtcggacgcctgccctcgcgcatcctcgttactgcgggggaattggagtatgtgggaggaacgatgatgggggaggttggtgacctcatggcgcagcaggttgcgcttgtgcatcttccgctcaaggcgctcgggctgacctgttgacggggttgagccgtggcgccgcttcctcggcggggtctcgatccgttgctcttccggcggttcggcgtcaggttgtggtgcgcgatctcccctaggacgggggggatcgccacctatatccgagggacgatgagacggccttccacgcttgctgcgcactttcgcagcccgccccttgcggtcacgtcgacgcggcggcggagtgacgtcctcaccgcgcgctaactgcgtcaacgccgccaccaggttggtgcccggtttcagccctttcagcacgaaccgcaccaggcgggggtctcggccgattcgtcgggcaatctcggcttggctccacccctcggccaacagggtgcgcaacaagtcttgggcccggttatcacgctcagtcactggtcgccccctcggggagtcctacttgctcggcctgctctgatagagcagcccgctccgatccggtctgaggcgcttccaaagggcccggcaagacacctttgacacgcagccgcccgtccttgccgtcatcgccgcccccctgggccacagggagcgcccaggggggcacgttgctggtgtagatggcgtcgccgtggatagccagcacggtgcgggagttcatgcgtagtgctcctcccttggttgtggcgttttttccggtggtggggtcggcgatgggtgtgttgagggtgcgcacgcgggacaaggcccagat

SEQ ID NO: 323 - DNA, 1856 bp, Propionibacterium acnes
  source 1..1856: mol_type = genomic DNA
ttggtattggtaggcgatggtgtcaccggttttgttgcggatgacgtcgaagccttcgatgtcggaggggatgtcgtcggcgtcgtagacgacggtggtggtgacggggttggaggccgacatttggccgatggtcacgcgcagcatgtttttcaacgcggaggtgaggattgtcgtggcggtggggtttttgtctgcccagcgtttctcggcgatgtcgatcatgtcttggatggttttgacccatcctcggatgggatcgactttggtcagtttgatcccttcgaggaactcgatgggctgggtgatgggcccatctggtccggcttcggtgtcccagccttcgtcgatggctagtttcagttcggcggtatcgacccatgtttcgtgggtggtgccgggcacgttgggccaaaaccatcctgctcgtcctttggtgcgtttgaccggtagtaggccgatgtcgtcccaccaggatggcacggtgaagcggatgtggtagcgggccgggtgccaggggttgttggtgaacaggtcgcgggcttcggtggcgctgagcagagtggcgggtgcggcaccgatctctccggtcactgatccggcatacatgaatcggccgtcgatgtacacgaagttagggatagggccggcaggcacggtggggcgccagcccttttcgcggtcctcggggttgccgtcgtcgacgcatagttcgtagcggtgctgaggggaggtgtgttggatgagtgcgcccagttcggggtccatcggctccatgcgataggactcgggggtccgtagcttccagaggttgattccttctgctccggggcggtccatgagggcccagtcgcggtcgattctggtggcgatgatgtgggttaattcgcgccatgcccagcgggcctggattggggtgagggtctggccagggaaccattcatcagcgaccagaatgtcgaggttgcggtcggtttctttgtgggtgaaccggcctcgggcgggccgcccggacagcatgaacaggccccgcacgtgccagtcctggttgaactcgcgggtgtgagcgggggtgtcaggcagcagccaggattgaggctggtcggggatgttaccgcagacgatcaggcgtcgggcgttgtggtgtagcgcggttgttagcaggtctgacagggtcgcgtgcttggtgcgtcgtccccccagcactggcaggatctcgtttccggccgcgtcgactccccgggcggtgtcgatgtctagccacactgtttcggggtcggggggccgatgtggggcgggacggcgctgctcctggtcgtctctcatggtttcctcctttgggccagggagcggccggcgtcgagggcgttcatgcgctcgcgttgttcttcgcgtagttggtagacccggcctcgtgacactcctgctgcctcggcgatggtggtggccggcaggtggccgatggcggcagcgtcggcaaggacgtcacgccaggccaggtcaatggttcccagctgggctagagcttcgtcgcggcggcgggtggcatcagccactacggaggcccaccctgtggggtggatggtcttgacgacgattcggttgtggcggatggggccccatgcatcagcggggacttgccagccgtgattggcggcggactcggtgatcttgaggcgtcgctcaggtgcgcgggtgcgggcagtgacgtcggtgttccaggtctggactggtacccacgtcccctctcggatgcgttcgatgacgcacgtggtgacctcgtcggtgactgtgatgaccagacgataatctttcccgtctggagtggttcgatagctgggcatgtcaccctcccc

SEQ ID NO: 324 - DNA, 1832 bp, Propionibacterium acnes
  source 1..1832: mol_type = genomic DNA
ttggtattggtaggcgatggtgtcaccggttttgttgcggatgacgtcgaagccttcgatgtcggaggggatgtcgtcggcgtcgtagacgacggtggtggtgacggggttggaggccgacatttggccgatggtcacgcgcagcatgtttttcaacgcggaggtgaggattgtcgtggcggtggggtttttgtctgcccagcgtttctcggcgatgtcgatcatgtcttggatggttttgacccatcctcggatgggatcgactttggtcagtttgatcccttcgaggaactcgatgggctgggtgatgggcccatctggtccggcttcggtgtcccagccttcgtcgatggctagtttcagttcggcggtatcgacccatgtttcgtgggtggtgccgggcacgttgggccaaaaccatcctgctcgtcctttggtgcgtttgaccggtagtaggccgatgtcgtcccaccaggatggcacggtgaagcggatgtggtagcgggccgggtgccaggggttgttggtgaacaggtcgcgggcttcggtggcgctgagcagagtggcgggtgcggcaccgatctctccggtcactgatccggcatacatgaatcggccgtcgatgtacacgaagttagggatagggccggcaggcacggtggggcgccagcccttttcgcggtcctcggggttgccgtcgtcgacgcatagttcgtagcggtgctgaggggaggtgtgttggatgagtgcgcccagttcggggtccatcggctccatgcgataggactcgggggtccgtagcttccagaggttgattccttctgctccggggcggtccatgagggcccagtcgcggtcgattctggtggcgatgatgtgggttaattcgcgccatgcccagcgggcctggattggggtgagggtctggccagggaaccattcatcagcgaccagaatgtcgaggttgcggtcggtttctttgtgggtgaaccggcctcgggcgggccgcccggacagcatgaacaggccccgcacgtgccagtcctggttgaactcgcgggtgtgagcgggggtgtcaggcagcagccaggattgaggctggtcggggatgttaccgcagacgatcaggcgtcgggcgttgtggtgtagcgcggttgttagcaggtctgacagggtcgcgtgcttggtgcgtcgtccccccagcactggcaggatctcgtttccggccgcgtcgactccccgggcggtgtcgatgtctagccacactgtttcggggtcggggggccgatgtggggcgggacggcgctgctcctggtcgtctctcatggtttcctcctttgggccagggagcggccggcgtcgagggcgttcatgcgctcgcgttgttcttcgcgtagttggtagacccggcctcgtgacactcctgctgcctcggcgatggtggtggccggcaggtggccgatggcggcagcgtcggcaaggacgtcacgccaggccaggtcaatggttcccagctgggctagagcttcgtcgcggcggcgggtggcatcagccactacggaggcccaccctgtggggtggatggtcttgacgacgattcggttgtggcggatggggccccatgcatcagcggggacttgccagccgtgattggcggcggactcggtgatcttgaggcgtcgctcaggtgcgcgggtgcgggcagtgacgtcggtgttccaggtctggactggtacccacgtcccctctcggatgcgttcgatgacgcacgtggtgacctcgtcggtgactgtgatgaccagacgataatctttcccgtctggggtggttcg

SEQ ID NO: 325 - DNA, 1890 bp, Propionibacterium acnes
  source 1..1890: mol_type = genomic DNA
ccacccctgccgggttcgacttcgacgctctggccgagtgggccgagagcgatgaggcgacccacaccccgcaaaccagccccgtgttccggggcaaggacgccgcgcgcgccagccgcgcattcctcggccgaggacggcccaccctcggcgcggaccacgccaccggcgagggccggtcgccccgccgtcaggtacggctcgacgcacgcaccaacgcgcgactcgacgcctacgcagccgcaaccggcaccagcgcctcccagatcatccgcgacgccctcgctgactacctgcccgcctgatcccaccccaatccactcgggcgcctgtcagtgccccctcttctgggtggtggtccggggcgtcaccgccccggaccagttgggtagtcatctcagttgaaataagcgattagtgatacgcccctcctgctttccggtgctgtcatgagcgtctgacaacagcgacacctcggggcagccgacggacagtcctctggctgccgctctgatcccatgcccacggcacgaaggtgtcggacagctcggtctcatcatgtgcccaaatagcgtcgtgggcctgtcgccaagcttctcgggagccccacacgggcacgaccgggccacaccggtgtcctggtctccagtgtcgcgacactgtcgatttcggtacgtgcaatgcggcggcggtttgacggatcgacatcccagactcccgcgcgtcccagatcgccatgtggagagtatttgcctccagtgcggccgccacacttgcacgctctcgcgcacgctcgaatgcccgcctagtgctctcaaatgtcgtcacgacgcctccccctgaaaatactcagggtgtcccacggtgggacaccctgagtatttcataccccaactcgcctcaccacacgtcgacctcgacaccgatcaagcgacccgtatcagcgacattgccgtaccgctgccccgcctggtcctccagccacgacaacgcatcccgaaacagcccgacgtcttccaaagctaaaccacagtcgtagccgcccttgtcccccaaccgcaccatctggcgctcccggtggcctccctcgtcgacctcgatccacagtttcgcgtgcatccgctggcctcggccctctgacaggatctcggtgagcaggtcggacgcctgccctcgcgcatcctcgttactgcgggggaattggagtatgtgggaggaacgatgatgggggaggttggtgacctcatggcgcagcaggttgcgcttgtgcatcttccgctcaaggcgctcgggctgacctgttgacggggttgagccgtggcgccgcttcctcggcggggtctcgatccgttgctcttccggcggttcggcgtcaggttgtggtgcgcgatctcccctaggacgggggggatcgccacctatatccgagggacgatgagacggccttccacgcttgctgcgcactttcgcagcccgccccttgcggtcacgtcgacgcggcggcggagtgacgtcctcaccgcgcgctaactgcgtcaacgccgccaccaggttggtgcccggtttcagccctttcagcacgaaccgcaccaggcgggggtctcggccgattcgtcgggcaatctcggcttggctccacccctcggccaacagggtgcgcaacaagtcttgggcccggttatcacgctcagtcactggtcgccccctcggggagtcctacttgctcggcctgctctgatagagcagcccgctccgatccggtctgaggcgcttccaaagggcccggcaagacacctttgacacgcagccgcccgtccttgccgtcatcgccgcccccctgggccacagggagcgcccaggggggcacgttgctggtgtagatggcgtcgc

SEQ ID NO: 326 - DNA, 1795 bp, Propionibacterium acnes
  source 1..1795: mol_type = genomic DNA
gacgccggccaccccaactactccgacccacacggtgaccccagctccggcctctgccggccactcgaccagcgacgagcacccaatccatacggataccgccacagcggacaaggccagcgacgaggacgccctgtccccaatccaggtgggcttgaccgccagcgtcggactggtgctggtcgccggactgatcaccaccctcaaccgccgctaccggacccggttcacccgccagccccgcggcaaggccatgaccctgcccagcccggacgcccaaactgccgagatagcgctgcgcagcaccggggcgactgacactctgacgatcacctgcctcgaccaggcgctccgcgcgatcggcgcatggtgccaccactgcgggcacccgctgccacccctgctggccgcccgcgtcgatgacgaccggatcgacctgctgctatcccaggcggcccccgaccatcccgaggcggtggagctggccgccgacggatcggtgtggaccctcaccgccgaccggatcgacgacctgctagcccacaccgatgacaaccaagcggctccgtggccgtctctggtcacactgggacgcgacgacgacgacgcccacatcctcatcgacttggaagccgcaggaaccttgcacctgatcgccgatgacgaccaggtcgacgcggccctcgccgcgatcgccgtggaactggccacctgtgactggtccgacgaggtcaacgtcaccctggtcggccaggtgtgcccgggcctagaagacgcactagagtctccgaccctgacccgcgccaccgacgtggacgccctcctcacccccctggaagctcgcgccgacgaccagcgacacatcctcaccgaaggaagccccctcgccgctcaccgagccgaccccgccatctccgacgggttcgacgccgaagtgatcctcctcgacaccgaactcaccgaagaccaccgcaaccgcctcgccagcctcgtcgaggctcttccccgcgtgtcagtcgccgcggtaacaaccagccccaccagcccagacgaatggtccctcaccctgacaggtgacccactagccgccgacgtggctcccctcggctggcacatccacccccaaaccctctcccccgacctgtacaaccgcatggttgaactactcgccaactccgccgccgcagactacgaacccgccagctggtggaaccacgacgccgacgacgagcccaccaccgaccccaccaacgaggaagaatctaccccgagcaggcgagcccgcccgaatatccgcctgaccaccctgaccggcggcatcgacctatccagcgtcgacatcgacgacatcatcgacgaagccaaccaggccctcgacaacaccgaccaggccaccaaccaggttcgtgtcgacaccgaccaacccggcaccgacacccccttccccatcgacgacatcgacccgctgagctccgaccatccggtcctatccatcatcggccaccccgacatcacaggtgccactggaaccgttgggcgctccccgtggcgctgccaacagttggccctctacatcgctgagcatccgggggtatcgggggcgactatcgccgatgatttggggctatcagcgtcgacggtgcgctcgattgctacacacctgcgacactggttgggagccgacgatgccggggtggcttacatgccggcggcgacgcgcggctaccggctcgatgagcggatcgtcacagatgtggacctgatcgacgctgctgtggccggggcaggcattaac

SEQ ID NO: 327 - DNA, 850 bp, Propionibacterium acnes
  source 1..850: mol_type = genomic DNA
gacagtgatacgtcgtatcggtgccctggtggcactgctggtggtgatagccggcttacccgccgggctcgtggccgcaggcgccccgctagtaccctcgggcctgtcatgggcccatgtgcggcatctgttggttaccccagacatgaccgggtcggtgctggtgtggctggtcagcctcatcggctggatcgggtgggcatggttcgccctggccgtcgcagccgaagcggtgacgatgctctcagggcagcggctgcactggcacatgcccggccctcgcctagtgcgccgagtggcagccggtctcctcattgccgcgttcgcggccgcaccggcagccacaagcacggctcacgccgccgaggccacccatgtggcggtcgccgcccaggctggaccggcacacgcggccggcacccaggacagccccgccaccacctctcaggccccggacgcctccaccactccgaaaatctggaagacctacacggtgcgggccaacgactacctgtggaagatcgccgagcactactacggtgacggcgcccaattccgtcgtatcgccgaagcctccggtatcgacccgcactcagagctgaaagccggccagaaactgatcctgccggttcctaagaacacggccgcagtccactcggttaaagcgggggagtatctgtggaagatcgccgagcactactacggtgacggcgcccagtaccataaaatcgctgaagcttccggtatcgatgcccattccgatctagccgtgggccaaaaactcgtcatccccgggcccctccgccacgacgccacgccgccacaccactcggcgtcgacccacgcgaag

SEQ ID NO: 328 - DNA, 1845 bp, Propionibacterium acnes
  source 1..1845: mol_type = genomic DNA
attcttgtttggcggtcatgatagcgatgaccgctgcctgggtaggcagtttgtcacgctggaccacagtgacgatggtggtcacgagctgcttctgtctggcggtgaggcctccggcgccgaccccgccgccggtgacagttcccatgcaggcatccccgccagcgcctccaccagagttatcgtcgagggccccagagcctactgacagcagcggcacaatgatcacggtcgctggcaagaccgccaggcccgccagcatcagcactgctgcactcaccacggcgatcacgtgagatgctttcaacgctgcccacctctcgctggtttgagggggcgacgcctgctggtacgcacaggcttggttgatccagtccgccgttgattggcaggcctgggtttgatcggcttgctgggacccggtttgggctccggagtcttaggctccggcttcacatgcctaggcacttcggctgcggtgggaggagtcagcacgtggcgtaccggcttggtgaccttctgggcacccgaaacaaccggcttagacaccaccttggcacctttgaccaccggtgcggctgccttcgcgccggccttcttgactgcacgatgcgctttgatagccccggcctcggcccggccaaccctactagcagtagcatcgagggctctgtggcccgtcgttgccctcaccggtgcatccttgccctggcgggtctgcttagcgatcgccgacataccgccccgcaatgccgaaacatgattgtgggcgtgggcgatcgccgacatgccggccgtcgcgatttttgactggccctgcggggcccctgccccagcacgaatctgccggtaagccgccgacgtgccacgagcacccgccgccattcgcgccaccttcgcagccctagtcactcccgtcgacacgccacccgtggctaccgcagcagcacccgagaccacagtcgaggccatccgccttcgacccaatccggtgagcttgcgaccaccgctgcgcaccatccggcgagcaccccgcccagcccactggccgatcaccgagcccctttcggaacgcttgctgcgcatccaatcgttgatcttgtccctcagccccttctcgcccttgtgacgacgccacatggacatcaagaacccgataatccccacgagctcgagcatgttgacaaccatgaccttgatggcgacatcaccgtcagaggcgaaaaccgacttgatgatgagcatgaccacacccaacatcaccatcgacccgacaatgccgatcatcgagtacaagatcgaacacagatcccggatgagcggatctgtgcggccagggatagcccgcaacacgttgagcatcgacatgaacgccgaccacaccaacttgcacacgtagaaccagcacatgcccgcgaacaccagcaggaccacagccaaacccgccaccgttgacgagtaaaagaagaaccccaccaaccacgaaccatccgcaatatcgccggcgtaatccgacaacccctcatcacagtcaccaaggtcgtcgcgagcatccgagacgtcatcgtaagggccacccttgagcacctcgatgtacttgtcgtggcacttcgcatcaataatgcggccatagttgagctgctgatgaaccggcgccacgaacgagtccacaatgatcgccgacagcttcggatccttcgagtctcccgtcgaggtcatgtcatcaggaatctcgacctcaccagcggtcgccgtcgcaggatcaaccgaactggtaatcatatgagacagcgccacaccgaactgctgggtgcgagccagcggagtagccaacgtcgtcgtatc

SEQ ID NO: 329 - DNA, 1875 bp, Propionibacterium acnes
  source 1..1875: mol_type = genomic DNA
ttgatgagcaccccagcggccagctctgtggcagcaaccgggtgggctgggctgtagaggaggtcgatgtcgcgggcagggtcgtcgggttcttcggttacctcgggtggggtcgatctggctgtctcggtgtcgtcggccaggtcggctcccaggatgcgttcccattcggggctggttttcttgcccgctgaggccatcgtctcgtcgatctgttcgtcagtgggccacacaaatttctttttggtccaggtcgtggtgtcgggtcgcagctgatccagcagttccaggtcttgcggggagtgggccttgcgggggtcgggggtgtagaagaattggacttccttgggggctgattcgccggataggtaggtgccgcggccgcgtttgccgaacgggattcccacgccgacgtgttcggagccgaacatcatgcgggctccgtcagcggacaggggtccggtggcggcacgcccggagaagttgtctcggatttcgccgcccaggaactcggcgtcggggcgttgggtccccagatcgacgtggatacggcaggcggctgccatgcgcagcagggagccgatccagccgaaaacggggcattctccgggcatcccagagaccttgatcgttgaccaccagtttttcgcgttgccgtagaactggcggtactcgtcgatgaggaccagcacgcgggtgaagtcggtctcgcgggccccttcttcttcgatgcggcggtagcggtcctccatgagagaccacagccagtggatgagggcgacctggtcggggacggtagtggcgaccatctcgatgttgggccactcccgcaggcccaggtactcgatgcgtttagggtcgatgacgaagacgcgccagttgcggcgggcaccctcgacggcgtcgccgatcatggacaccgtttttccggtacgggtgcggccggccttgagctggtgggccatgacaccggagatgtcccagaaacaggtgttgccgtcctcgtcgacggcctgggggattttctcccagtctggggagtctgggcccggaagggccacgggtcggggcaccatcgagggcagggggtggcggcgggtgacggtgatggtgtcgtgttccaggtcgaagtcgctgcgccactggccgagcatcatcgccgaggtcaccgcggccaggcgcaattggatgttcgggctggacaaatgggcgccacgttggtggtgaatggtgaagccgtccaggttcccccgatcggttttccaggaatcgacggtgaccgccgacccatagatctgagtggctacttctttagcccgttccttgtctcggtccagatcggttttgtcagggtcaggggtcggggcgcggtattgcaggacgaaccggccggccgggatcgttgcggatgtcaccgtgaactctgccggcgaccaggcagccgcggccgcctgggtgagggccattggcatggtctcgacggcagcctcctcgggggggatggtgagggtcaggcgtcgcggatgcgtcttcttgcgattccatgtgactttctgcctcaccggcaccttcgccgccgactgaatggctaggcgagctgattcggcagtttcggtacgccggccagcgcgtagcgcccgtcgtgcgtgaaggctgcccaccacagcacagcccatacacggcagccaccagcgcggatcagcggctgctgcatagcccccggtagctagtaccgcacctgaccagccggccgcgatacttttccacgccggtttcgcaccaacagtcggggcagacgctggccgcttcgagaccgaggagggacgagacaagggagtgctggtcatgccgcggcctccttgtggcaggtcattt

SEQ ID NO: 330 - DNA, 1794 bp, Propionibacterium acnes
  source 1..1794: mol_type = genomic DNA
agaagacgcactagagtctccgaccctgacccgcgccaccgacgtggacaccctcctcaccaccctagaagctcgcgccgacgaccagcgacacatcctcaccgaaggaaaccccctcgccgctcaccgagccgaccccgccatctccgacgggttcgacgccgaagtgatcctcctcgacaccgaactcaccgaagaccaccgcaaccgcctcgccagcctcgtcgaggctcttccccgcgtgtcagtcgccgcggtaacaaccagccccaccagctcagacgaatggtccctcaccctgacaggtgacccactagccgccgacctggctcccctcggctggcacatccacccccaaaccctctcccccgacctgtacaaccgcatggttgaactactcgccaactccgccgccgcagactacgaacccgccagctggtggaaccacgacgccgacgacgagcccaccaccgaccccaccaacgaggaagaatctaccccgagcaggcgagcccgcccgaatatccgcctgaccaccctgaccggcggcatcgacctatccagcgtcgacatcgacgacatcatcgacgaagccaaccaggccctcgacaacaccgaccagaccaccaaccaggttcgcgtcgacaccaaccaacccggcaccgacacccccttccccatcgacgacatcgacccgctgagctccgaccatccggtcctatccatcatcggccaccccgacatcacaggtgccactggaaccgttgggcgctccccgtggcgctgccaacagttggctctctacatcgctgagcatccgggagcatcgggggcgactatcgccgatgatttggggctatcagcgtcgacggtgcgctcgattgctacacacctgcgacactggttgggagccgacgatgccggggtggcttacatgccggcggcgacgcgcggctaccggctcgatgagcggatcgtcacagatgtggacctgatcgacgctgctgtggccggggcaggcattaacaccgctgagacggccacactggtggccattttgaagctgggccgcggacgggtcttcgctggggttcctgactcggaacttcgccagttcagggcgtcgatgtaccacgtggaggcccgcatcgtcgatgctgccctccaagtgacagaccgggccctggaagccggggacctggggctggcccggtgggcgttgacccaagggctactggtgtctcccgatcatgaggacctggtcaccggttgtctgcgcaccgagtaccaggccggcaacatggacaaggtttccgagctggtcgatcacctgtcggctaccgcacgacgcctgggcgtcgatttgagcgccgacaccacccggatcatcgactccgttattacccatacacgcaggagagcatcatgatctcccgttgcactcatctccgtcaggaaggttcctatgcaccattatcgtcttggtatcggcactgccctcatcgcggtagcagccgtggccggctgtcgctcaacagactcgacacccacaccacctccatcccgtgtctccgccacgacatcagcgagctctaccctcagcccgaccccgtcagccggagcggtcagtgccgccgacgccgaaaaggtctaccgcaccttgcacaccaacgtgttcgcattggagaagaagggtggcctggtacccggggaacccgcacccgcatccctctcggactacgccagcggccaagcactcaagaactacatgaccttcaaccaccaaatctcggg

SEQ ID NO: 331 - DNA, 1064 bp, Propionibacterium acnes
  source 1..1064: mol_type = genomic DNA
caccaacacatccaaaaccatcctcacgctcacccgcacagccaccatctcccacctgctagccatcctcgatggcctaccccaagctgaggggactcactggctcaacactcaacccgacctccaccacatcaccctcgacgactccaccaccggctgggccaccaaccgcaccgacgacaccgacaccggcgtctgctacgacaccagcacccacaactggcagatctgctgacagcatgacgggcctgcccttgaggggttggactctgcacccatttcagccgggtacgttgccggctgggcgaaggaagcagacggcgccgcgattgaagctgccgccgagcacgtcgcgaagacctcccacgcgattgccgaggcgttgcagctcaccgcacagtgagccccacggggcgaccggctcaccccggtcgcccctcaccccccgacaggggaaccgttcccgccgcctgaatctccatacccctgatacgtactacgcggggtcgaggagtggactcccccgccctgagcagtacactgtactacacagtcattgaggatagaggtgacgtcatgagtttttcgatccgtttacccgaccatgagcgccgcttagcggactcctacgcccgcctacactcacaatccctgagcgaggctttcaagcaagccctcttcgaccgcatcgccgacgagttcgaccttcagatagcacacgaagctctcaccgactacgccaacgacaactaccagtctcgtcccatcagcgagctatgggacgagtgtgacctatgagctggcagatcgaaaccactagccggttcgataaagaattcaaaaagctggaccgctacacccaaaaactcattcacggctggatcacgaaaaacatcgacaacaccgacgatccccgccgccacggcaagcccctcaccggtgatctttctggactgtggcgctaccggatcggtgattatcgcctcatatgcacactcaacgatgaccgcctcatcatccttgccctgtccatcggtcaccgccgcgacatctaccgctaagcc

SEQ ID NO: 332 - DNA, 1639 bp, Propionibacterium acnes
  source 1..1639: mol_type = genomic DNA
gagccagttatcctcatctacgacgatggctatgaactcctgatccacgccatgaaagcccgccctcagtatctgagctacttcgctatctagtgttgttgggcgagttgaactcaacttttctccgacgcaagcgccaataaaaggctgatccatccgaataccaccaaacacggctgaagtgtggaacagattcagcaagacagggtgcggtgctcgggtgcgttggggagatgaggatattcaggcttctggcgggatgtggcttgatgacgtccaggatcaccggttcggttttgaaggtgccttgcattaatgtcgacagggtcgtacgactcgaggactggatcgaccagcccgttgcgtctgaagaacttcatccaccccggtggagctccggccgcgtactggtgcaacggatcattagcatgggtagcgtgagtatgccttcgatcgtggtcagtgctgtcatcatccaagattctgacgggcggcttctcactgtccgtaaacgaggcgccgaggcattcatgctgccaggcggcaagccggagcccggcgaggactcgcgtcaggcagtagtccgggaagtgcacgaagagctcggcgtcgcattgtcttccgacgacctgcgtcgggtgggagtgttcaccacgcgagcagcgaatgaggccggccatcaggtggtggcgacgattttcacccacaccccggttgcggtgagtgagccagctgctgagatcgagcagattcgttggctcgattggagtgtcgacgccctgcctgatgacctggccccgctgctggtcgaggcagtcatcccgtggctgcggcgccgtatccggtcggtcgctgtattcacgggtgcgaaggatggaaccgaccctcattatcgtgtcgaagcaaccgccttgggccggggtctcgcacacgccgggatcaccctggtttatggcggcgggaaggtcgggatgatgggtgctgttgctgatgcggccctcgctgctggcggcgctgtgatcggagtgatgccgcagcacttggtggacggggagatcgcccatcctagtctgactcacctcgaggtagtgcggactatgcatgagcgcaagcagcggatgagtgacctagctgacgcgttcgtcgcgctacccggcggcggcggaacccttgacgagctattcgaagcatggacatggcagcagctcggtgtacacagcaaacccgtggccttgtacgactcgaccttctgggcaccgctgaccgcgctactcaaccacatgaccatcgaaggcttcatccgccctgaggaccgcgcctcgctcgtgatcgccgataccatacatcagctgatggccgatcttgagggatggaccccaccaccaccgaagtggcgctcgtgacatagaacaaatgattctgactatggctcattgacatctgcgcagcggctactagctccatcgacttcaaatcgggccttggccgaggctcggttcaggtggcccggaatggatccccacaaattgaatgctcatgatcgaggtgatgaacgcccactctattgtcctacgcccggttgtatccagcgagcaattgaaggtgctgcgcctgttggtcgaccaggccgagccactca

SEQ ID NO: 333 - DNA, 1200 bp, Propionibacterium acnes
  source 1..1200: mol_type = genomic DNA
ccggagtatctggacaaggccgtgctcactgcgttgtatcccgatgggttgcccttcgacgaggacaccgaggagccgggcgagaatgccgggcaggaggagcttgcgatgactggatgagcccgaacatggttgaaggccgccccgccaggcgaccttcaatcaatggtttcggttgtcagctgcagccacccttgccaggtgctgtggttcttctccagaggaggagggaccgccatgaagacccagaagatctagaagatccaaaagaaccggtttcggctgttgcttcggtcttcatggtagctgatagcccgcgtcgttggaagtgcgacgacgccgatcctcatcggtatcgcaccctgttccagggtcgagaatgtgaaggattaacaaccatgacaagtcatgagacgccctccctgagggcgtcatgaccgctttaattcaagctctgccgacagctgaactgtctgctggacctggtgctagcagtccagctagaccctctgctgagggcttcatcaagattcatcacgaccttattagtgcgggcgtgtcgggtaacgcgatggcgttgttcgtcgcgttacgtaaccagcccggctgtgatcagtggacccgtcactcgtacctgcggctagcccaatggtgcggctgggatgggctgtcggaggcggcgggctgtaagcgggtgcagcgggccgctgctgagctcgctagcggtggttggctggaatcgcgggtcggccatgatcgtcgcaccgctaagacgctggtgtggcatcggttgaccagccccgacaccgaccgctgggagcaattgccgcggattgtgtgggcgaggatctgccagatcgccggggagacgtcgggagagtgggtgaggcattggctggtgtggcggatgctggccggtcgtactggtgtggctcaggcccctatgtccatcgtggctcggttcctgggctgttcttcgcgccaggtctctcatatccgtggggctctcgttgatgccggtctgctcggctgtgacgaggtctcgggggcggcgagccgggtgtggttcccctcgatggccgaggagtgtgcagcggatcgtgaggtggtcgatggggccgtcgtcgatgctggggtgggctctggtgaaggtgtcgaggagggcggggaacccctgtcgattttgtccacccacccctg

SEQ ID NO: 334 - DNA, 1639 bp, Propionibacterium acnes; identical to SEQ ID NO: 332
  source 1..1639: mol_type = genomic DNA

SEQ ID NO: 335 - DNA, 1202 bp, Propionibacterium acnes
  source 1..1202: mol_type = genomic DNA
ccggagtatctggacaaggccgtgctcactgcgttgtatcccgatgggttgcccttcgacgaggacaccgaggagccgggcgagaatgccgggcaggaggagcttgcgatgactggatgagcccgaacatggttgaaggccgccccgccaggcgaccttcaatcaatggtttcggttgtcagctgcagccacccttgccaggtgctgtggttcttctccagaggaggagggaccgccatgaagacccagaagatctagaagatccaaaagaaccggtttcggctgttgcttcggtcttcatggtagctgatagcccgcgtcgttggaagtgcgacgacgccgatcctcatcggtatcgcaccctgttccagggtcgagaatgtgaaggattaacaaccatgacaagtcatgagacgccctccctgagggcgtcatgaccgctttaattcaagctctgccgacagctgaactgtctgctggacctggtgctagcagtccagctagaccctctgctgagggcttcatcaagattcatcacgaccttattagtgcgggcgtgtcgggtaacgcgatggcgttgttcgtcgcgttacgtaaccagcccggctgtgatcagtggacccgtcactcgtacctgcggctagcccaatggtgcggctgggatgggctgtcggaggcggcgggctgtaagcgggtgcagcgggccgctgctgagctcgctagcggtggttggctggaatcgcgggtcggccatgatcgtcgcaccgctaagacgctggtgtggcatcggttgaccagccccgacaccgaccgctgggagcaattgccgcggattgtgtgggcgaggatctgccagatcgccggggagacgtcgggagagtgggtgaggcattggctggtgtggcggatgctggccggtcgtactggtgtggctcaggcccctatgtccatcgtggctcggttcctgggctgttcttcgcgccaggtctctcatatccgtggggctctcgttgatgccggtctgctcggctgtgacgaggtctcgggggcggcgagccgggtgtggttcccctcgatggccgaggagtgtgcagcggatcgtgaggtggtcgatggggccgtcgtcgatgctggggtgggctctggtgaaggtgtcgaggagggcggggaacccctgtcgattttgtccacccacccctgtc

SEQ ID NO: 336 - DNA, 1641 bp, Propionibacterium acnes
  source 1..1641: mol_type = genomic DNA
tattcgtccagatccgtcaagtcctcaaccgtgcctccctggaaaacgtcgacccgtggaacgggctagaccggctagccgaggacatcaaactgcccgaactcaccgatgtggtctccatcgcccgcctccaaaacgaaggcgcctccctcgtcgacagtttccgggcccgagtcgccgagttacgcgacgcctacctgctgcgcctgcaacaagaatccaccgccatcacccagcggcttggtttgtggacgatcctgcaagccggctcggtcatgctcatcttgctgggggcggccgccctcacactcatcacagccggataaaccgacaccgtgtcgagcccccatatgggccgcgaacctttcataatgatgcctgtaagcaccacaatattgatcacaacctaacaatgaaggagaaatcatgatgaccgatctcgacctggctaaaaaacagatcacctggctggcggcgcacctgagttcccggatcgttgacgagcgtggcggtggtagctctaccgtggagacactgatttggattggtgtcatcgtggcgctggtgattggtgtgggcgtcggggtgacggcctatatcaggtcgaagatgcctcactgacgacgatgcgtagcaggttcacaactgatcagcgtggcggtggtagcgcgtcggtggggatgctcctgctgatgcctgcgatcatgctgctggcattcggtgggatcgaggtcgggatgtggtgtcacgcccatcagtcgaccatcgcggcagcccaaagcgccgcggaagctcagcgtgtcgtccatccggtcccggggtcggcacaggaggcagcctcgcagatcactagtcatggcggggtgcgtgatacccggatatcggtcagtgatgacggggccactgtcacggtgaccgtctcaggtcgggccccatcgatgctggggctgcatcttccggctgtgtcgtcgacagcgtcgatgcccaaggagcgcctgtcgtgaggcgaagtgagcgcggcggagcaagtctaagcgtcgaggtgctcatgtgggcgccgatcgcgctggtgatcatcgggtttgttgtgggtatcggccggatgtcgatggcccaggacgcggtgagtggcgcggctggtgctgcggcccgtgcggcgtcgttggagcgtgatggacagtcggctcagtctgcggcgcagcaggcggcgtcggcgaacctgtcgtccggtgggctggcatgtgcgccgagtgtgagcgtggacacgtcagtgtttgcccgtcctgccgggcaggcgggcacggttcacgccacggtcacgtgtgtcacctcgctgggtcttggattcgggtcccggacggtgcacgcaacggggtctgccccggtagacacctatcgggaaaggagaggctgagatggcccgcgatgagcgtggtggcggctcggtgtcggtgtggatgctgctcatggtgccagtaattctggtcatggccggcctggtttttgacgggtcccgtcagatatcggcaacccaggcggcccaggacgcggcggttgcggcatcccgcgccggaactgatgcggcagcgacaccgcagctagctggccacgacggggcggccgtagcagtccaagcggccc

SEQ ID NO: 337 - DNA, 1630 bp, Propionibacterium acnes
  source 1..1630: mol_type = genomic DNA
tctgcccagcgtttctcggcgatgtcgatcatgtcttggatggttttgacccatcctcggatgggatcgactttggtcagtttgatcccttcgaggaactcgatgggctgggtgatgggcccatctggtccggcttcggtgtcccagccttcgtcgatggctagtttcagttcggcggtatcgacccatgtttcgtgggtggtgccgggcacgttgggccaaaaccatcctgctcgtcctttggtgcgtttgaccggtagtaggccgatgtcgtcccaccaggatggcacggtgaagcggatgtggtagcgggccgggtgccaggggttgttggtgaacaggtcgcgggcttcggtggcgctgagcagagtggcgggtgcggcaccgatctctccggtcactgatccggcatacatgaatcggccgtcgatgtacacgaagttagggatagggccggcaggcacggtggggcgccagcccttttcgcggtcctcggggttgccgtcgtcgacgcatagttcgtagcggtgctgaggggaggtgtgttggatgagtgcgcccagttcggggtccatcggctccatgcgataggactcgggggtccgtagcttccagaggttgattccttctgctccggggcggtccatgagggcccagtcgcggtcgattctggtggcgatgatgtgggttaattcgcgccatgcccagcgggcctggattggggtgagggtctggccagggaaccattcatcagcgaccagaatgtcgaggttgcggtcggtttctttgtgggtgaaccggcctcgggcgggccgcccggacagcatgaacaggccccgcacgtgccagtcctggttgaactcgcgggtgtgagcgggggtgtcaggcagcagccaggattgaggctggtcggggatgttaccgcagacgatcaggcgtcgggcgttgtggtgtagcgcggttgttagcaggtctgacagggtcgcgtgcttggtgcgtcgtccccccagcactggcaggatctcgtttccggccgcgtcgactccccgggcggtgtcgatgtctagccacactgtttcggggtcggggggccgatgtggggcgggacggcgctgctcctggtcgtctctcatggtttcctcctttgggccagggagcggccggcgtcgagggcgttcatgcgctcgcgttgttcttcgcgtagttggtagacccggcctcgtgacactcctgctgcctcggcgatggtggtggccggcaggtggccgatggcggcagcgtcggcaaggacgtcacgccaggccaggtcaatggttcccagctgggctagagcttcgtcgcggcggcgggtggcatcagccactacggaggcccaccctgtggggtggatggtcttgacgacgattcggttgtggcggatggggccccatgcatcagcggggacttgccagccgtgattggcggcggactcggtgatcttgaggcgtcgctcaggtgcgcgggtgcgggcagtgacgtcggtgttccaggtctggactggtacccacgtcccctctcggatgcgttcgatgacgcacgtggtgacctcgtcggtgactgtgatgaccagacgataatctttcccgtctgg

SEQ ID NO: 338 - DNA, 1643 bp, Propionibacterium acnes
  source 1..1643: mol_type = genomic DNA
gcgagccacgaccatcgccaagctgaatggagagcgagcatgagcaccacccctgccgggttcgacttcgacgctctggccgagtgggccgagagcgatgaggcgacccacaccccgcaaaccagccccgtgttccggggcaaggacgccgcgcgcgccagccgcgcattcctcggccgaggacggcccaccctcggcgcggaccacgccaccggcgagggccggtcgccccgccgtcaagtacggctcgacgcacgcaccaacgcgcgactcgacgcctacgcagccgcaaccggcaccagcgcctcccagatcatccgcgacgccctcgctgactacctgcccgcctgatcccaccccaatccactcgggcgcctgtcagtgccccctcttctgggtggtggtccggggcgtcaccgccccggaccagttgggtagtcatctcagttgaaataagcgattagtgatacgcccctcctgctttccggtgctgtcatgagcgtctgacaacagcgacacctcggggcagccgacggacagtcctctggctgccgctctgatcccatgcccacggcacgaaggtgtcggacagctcggtctcatcatgtgcccaaatagcgtcgtgggcctgtcgccaagcttctcgggagccccacacgggcacgaccgggccacaccggtgtcctggtctccagtgtcgcgacactgtcgatttcggtacgtgcaatgcggcggcggtttgacggatcgacatcccagactcccgcgcgtcccagatcgccatgtggagagtatttgcctccagtgcggccgccacacttgcacgctctcgcgcacgctcgaatgcccgcctagtgctctcaaatgtcgtcacgacgcctccccctgaaaatactcagggtgtcccacggtgggacaccctgagtatttcataccccaactcgcctcaccacacgtcgacctcgacaccgatcaagcgacccgtatcagcgacattgccgtaccgctgacccgcctggtcctccagccacgacaacgcatcccgaaacagcccgacgtcttccaaagctaaaccacagtcgtagccgcccttgtcccccaaccgcaccatctggcgctcccggtggcctccctcgtcgacctcgatccacagtttcgcgtgcatccgctggcctcggccctctgacaggatctcggtgagcaggtcggacgcctgccctcgcgcatcctcgttactgcgggggaattggagtatgtgggaggaacgatgatgggggaggttggtgacctcatggcgcagcaggttgcgcttgtgcatctgctggtcgagacggtcgggctgacctgttgacggggttgagccgtggcgccgcttcctcggcggggtctcgatccgttgctcttccggcggttcggcgtcaggttgtggtgcgcgatctcccctaggacgggggggcttgccacctatatccgagggacgatgagacggccttccacgcttgctgcgcactttcgcagcccgccccttgcggtcacgccgacgcggcggcggagtgacgtcctcaccgcgcgctaactgcgtcaacgcctcgaccaggttggtgcccggtttcagcccttttagcacgaaccgcaccaggcgg

SEQ ID NO: 339 - DNA, 1583 bp, Propionibacterium acnes
  source 1..1583: mol_type = genomic DNA
gaacggggcatgggattagccgaggcgctgcgcgaggggacggcccttcccccaccacagcatctcagcgaaaacctccacctggtcagtggcggcccggccctccacgagttcaccgaccccgcatccttagcggccatcatcgaccgagtcaccaccgcacgctacgacctgctagctcaggcccttgccccgctggcctgggactatgacctcatcttcatcgactccgggcctgcccaaactctgctgtcccagaccatccttggagtagcccgctggctggtagtgcccacccgcaccgataacgcctcaatcactggcctcgtcgacgttcaagacgccatcgacggggttgcctcctgcaaccctgaccttcaactactcggcgttgtcctagccggcgtgggggcccgggccacccggatcgccgcagataaacgccacgccatcgacacagtgctgggggcaggaaccgttttcgatgcggtcatccactactccgagaaggtgtccgtgctcgcacgccagcagggcaagaccgtcgccgagctagccaacgagtaccacaacacccagcccgcctacacctacctagctaaaggccagaacatccccaacgtcgccaaggcagccgtcagcatcgaaactgattatctgaggctggccaccgagatcagcgaccgcatgttcaccagcgacgagcaggagcctgatcatgactgacgatccgactccatccgagcagaacaaccccaccagcgacgacatgcgcttggccgaagaatgggccaacagcggccgcacagtgggagccctgccgcgccgtcaacggcctcagcaacccacaccccgcaccaccagccaaccccctgtctcgtcccctgacacaccggctccgaaaaaaccccagaagacccccaccagccagcctggccgtcaacggatcaacgtcaccgtctacgttgtgcccgaactccatgagcggctgcgctcccgatcggcggcgacgggggtgacggtctcggatctggtggtgcatgcgttagcgttcgtcgccgatcatgcgggggaggcgatcgccgatgatctgcgcgtcgagacgggccccggcatgggggccggactgttcgatgtgaccccatcgcggccagtaggggtcgccaaaacccagctgggggtgcgaatgacccgccacaacaagaatggcttggaccagctgacccggacgagtggagcccgtgaccgcagccatcttgtgtctgtcgccgtgcgcgactatctcgactccaaccctgtaaagaaaggccgacatgtccgctgatgaaactcctgccgcccggggtgggcgacgctttgatacgaccgtcaagcccaggcgccgtcccatgcttatcgccgccggtatcgccatcgtgatagtcggcgcgctcctcatcactcagttgattcgctccgcccaaaccgagcatcgcgtgctggaagtccacgccgatgtggctcgcggcgaggtcatccgtgacaccgatctggtatcggtgactgtcggccaggtcgacaacgtatcaacggttcccgcagac

SEQ ID NO: 340 - DNA, 1551 bp, Propionibacterium acnes
  source 1..1551: mol_type = genomic DNA
gctgagaaaaattttgggtccgccctgcatatcggggcctcttcataccttcaaaagtgtgaagggaatacagactcttcgactggaattaaaatggtatatggcgtgtccggtccgcacccagctccacgatgcgccatagaggagccataacttcaccaatcgtatacgatatgagtgtaggtgagcatctaccggtggccgacagtcagatacaagcatgggcggatgaagcagaagctgattatgacctcagcatgcttccgccgtctcgacgtggtcgcccaccggtggggaggggcccgggcactgtggtccctgtgcgcttcgacgcggacactctcaaggcgttgtcacaacgagcccctgacgaaggattgaccacgcgttctgacgcgatccgtgctgcggttaaccagtggctcggcctcggctcgtaaacattatcggcgcgacaaccttactgatgacgctgttggttacgccgtagagcacatcttgtactcgtgggcgctcgacgatgccgatgatcctcgttgctggatgatgattcggtgttgacccagctggcctcctcatggagctagttatcctcatctacgacgatggctatgaactcctgatccacgccatgaaagcccgccctcagtatctgagctacttcgctatctagtgttgttgggcgagttgaactcaacttttctccgacgcaagcgccaataaaaggctgatccatccgaataccaccaaacacggctgaagtgtggaacagattcagcaagacagggtgcggtgctcgggtgcgttggggagatgaggatattcaggcttctggcgggatgtggcttgatgacgtccaggatcaccggttcggttttgaaggtgccttgcattaatgtcgacagggtcgtacgactcgaggactggatcgaccagcccgttgcgtctgaagaacttcatccaccccggtggagctccggccgcgtactggtgcaacggatcattagcatgggtagcgtgagtatgccttcgatcgtggtcagtgctgtcatcatccaagattctgacgggcggcttctcactgtccgtaaacgaggcgccgaggcattcatgctgccaggcggcaagccggagcccggcgaggactcgcgtcaggcagtagtccgggaagtgcacgaagagctcggcgtctcattgtcttccgacgacctgcgtcgggtgggagtgttcaccacgcgagcagcgaatgaggccggccatcaggtggtggcgacgattttcacccacaccccggttgcggtgagtgagccagctgctgagatcgagcagattcgttggctcgattggagtgtcgacgccctgcctgatgacctggccccgctgctggtcgaggcagtcatcccgtggctgcggcgccgtatccggtcggtcgctgtattcacgggtgcgaaggatggaaccgaccctcattatcgtgtcgaagcaaccgccttgggccggggtctcgcacacgccgggatcaccctggtttatggcggcgggaaggtcggg

SEQ ID NO: 341 - DNA, 1546 bp, Propionibacterium acnes
  source 1..1546: mol_type = genomic DNA
gctgagaaaaattttgggtccgccctgcatatcggggcctcttcataccttcaaaagtgtgaagggaatacagactcttcgactggaattaaaatggtatatggcgtgtccggtccgcacccagctccacgatgcgccatagaggagccataacttcaccaatcgtatacgatatgagtgtaggtgagcatctaccggtggccgacagtcagatacaagcatgggcggatgaagcagaagctgattatgacctcagcatgcttccgccgtctcgacgtggtcgcccaccggtggggaggggcccgggcactgtggtccctgtgcgcttcgacgcggacactctcaaggcgttgtcacaacgagcccctgacgaaggattgaccacgcgttctgacgcgatccgtgctgcggttaaccagtggctcggcctcggctcgtaaacattatcggcgcgacaaccttactgatgacgctgttggttacgccgtagagcacatcttgtactcgtgggcgctcgacgatgccgatgatcctcgttgctggatgatgattcggtgttgacccagctggcctcctcatggagctagttatcctcatctacgacgatggctatgaactcctgatccacgccatgaaagcccgccctcagtatctgagctacttcgctatctagtgttgttgggcgagttgaactcaacttttctccgacgcaagcgccaataaaaggctgatccatccgaataccaccaaacacggctgaagtgtggaacagattcagcaagacagggtgcggtgctcgggtgcgttggggagatgaggatattcaggcttctggcgggatgtggcttgatgacgtccaggatcaccggttcggttttgaaggtgccttgcattaatgtcgacagggtcgtacgactcgaggactggatcgaccagcccgttgcgtctgaagaacttcatccaccccggtggagctccggccgcgtactggtgcaacggatcattagcatgggtagcgtgagtatgccttcgatcgtggtcagtgctgtcatcatccaagattctgacgggcggcttctcactgtccgtaaacgaggcgccgaggcattcatgctgccaggcggcaagccggagcccggcgaggactcgcgtcaggcagtagtccgggaagtgcacgaagagctcggcgtcgcattgtcttccgacgacctgcgtcgggtgggagtgttcaccacgcgagcagcgaatgaggccggccatcaggtggtggcgacgattttcacccacaccccggttgcggtgagtgagccagctgctgagatcgagcagattcgttggctcgattggagtgtcgacgccctgcctgatgacctggccccgctgctggtcgaggcagtcatcccgtggctgcggcgccgtatccggtcggtcgctgtattcacgggtgcgaaggatggaaccgaccctcattatcgtgtcgaagcaaccgccttgggccggggtctcgcacacgccgggatcaccctggtttatggcggcgggaagg

SEQ ID NO: 342 - DNA, 1496 bp, Propionibacterium acnes
  source 1..1496: mol_type = genomic DNA
gggaatacagactcttcgactggaattaaaatggtatatggcgtgtccggtccgcacccagctccacgatgcgccataggggagccataacttcaccaatcgtatacgatatgagtgtgggtgagcatctaccggtggccgacagtcagatacaagcatgggcggatgaagcagaagctgattatgacctcagcatgcttccgccgtctcgacgtggtcgcccaccggtggggaggggcccgggcactgtggtccctgtgcgcttcgacgcggacactctcaaggcgttgtcacaacgagcccatgacgaaggattgaccacgcgttctgacgcgatccgtgctgcggttaaccagtggctcggcctcggctcgtaaacattatcggcgcgacaaccttactgatgacgctgttggttacgccgtagagcacatcttgtactcgtgggcgctcgacgatgctgatgatcctcgttgctggatgatgattcggtgttgacccagctggcctcctcatggagctagttatcctcatctacgacgatggctatgaactcctgatccacgccatgaaagcccgccctcagtatctgagctacttcgctatctagtgttgttgggcgagttgaactcaacttttctccgacgcaagcgccaataaaaggctgatccatccgaataccaccaaacacggctgaagtgtggaacagattcagcaagacagggtgcggtgctcgggtgcgttggggagatgaggatattcaggcttctggcgggatgtggcttgatgacgtccaggatcaccggttcggttttgaaggtgccttgcattaatgtcgacagggtcgtacgactcgaggactggatcgaccagcccgttgcgtctgaagaacttcatccaccccggtggagctccggccgcgtactggtgcaacggatcattagcatgggtagcgtgagtatgccttcgatcgtggtcagtgctgtcatcatccaagattctgacgggcggcttctcactgtccgtaaacgaggcgccgaggcattcatgctgccaggcggcaagccggagcccggcgagaactcgcgtcaggcagtagtccgggaagtgcacgaagagctcggcgtcgcattgtcttccgacgacctgcgtcgggtgggagtgttcaccacgcgagcagcgaatgaggccggccatcaggtggtggcgacgattttcacccacaccccggttgcggtgagtgagccagctgctgagatcgagcagattcgttggctcgattggagtgtcgacgccctgcctgatgacctggccccgctgctggtcgaggcagtcatcccgtggctgcggcgccgtatccggtcggtcgctgtattcacgggtgcgaaggatggaaccgaccctcattatcgtgtcgaagcaaccgccttgggccggggtctcgcacacgccgggatcaccctggtttatggcggcgggaaggtcgggatgatggg

SEQ ID NO: 343 - DNA, 1526 bp, Propionibacterium acnes
  source 1..1526: mol_type = genomic DNA
cgcacggctgctcgcacccatggcggccgccagatgcgcgccgcctccacccgcgtcctcaccatgtcctgcgcaatcgtttgcgccctaccccgaaggggtcaccactacaggaaagttaagttcctagatggtcaccaacgcacgcgcaggcgcgtgcgaaggccagcaacaccagagaagaaacccctgtggctgcaaaaactcgcagccctcctcgaccagcacctgccctggctggtgagaaaccatcacatcggccgactgtgccacgccctcaccgccctgggcatcgacgaacactggcaacccgcagacctcgacgccctcctcgacgccatgaaccgcaggaaccgtcgcctcggcctcgacgtgccatgcgccgacgaccagcacaaccccttgggactgttcatccaccaggcccgagacaccctcacccacgacaacccccatgaacgccgcctggcccgcgaacaccaccgcgcccaactcatcgacgaccaactccgccgccgcgcagaaaccgccacctgcgcagcccgcctcgcagccgagcacgccgaccccgactaccagacccgccgtcgtgaacgcagggaaaccctgcgagccacactcagggccgcccagcagcatgtcaggacacactgatacccgctcatacacacaccatgaaacacgacaagccacctgacagtatcagctgcaagacgcatgacaacatagaaggatatgatgaaatacacatagacacaacccagcacagcagtttcgcaacaaatcatgatagtctcatggcagtatcgcttgatacacacatagcatcactcccacataggcagttatgctgatatactcctactaggttatccgtccaacatgctgagtgggttcctgtacagcatgaaaggagcatggcatgatatgggccgttctcaactgcaagggtggtgtcggcaagacgaccagtgccctcctgctggcggcagccgccgccaagcagggccacaccaccctggtggccgacgctgacccccagggcaccgcatcccagtggtcagccctggcaaccaaaaacgacgaacccctgcccttcccggtgcaagcggtcaacatcgccaccatggaggcactgcccaccaccaccgacgcccatgatctcatcctcgttgacacacccccctcggcaggcgatctgatgttccaggcatgccgcatcgccgacctcatcatcatccccaccgccacctccggacccgacatctcccgaacatgggtcaccatggacgccacacaaggcacaccacgcgcgatcctcctcacccaaaccgaacacaaccgtgtcgtctaccgccaagctcgcactgccctcgccgccgacgacaccgtcgttctcctggaccacgacatcccccgccgtgaatccatccgcacagcatggggcaccaaccccccagacgacgtcatcacctactacctgcccgtcctcaacgaactcatggaggccctgtcatgaccaccaa

SEQ ID NO: 344 - DNA, 1473 bp, Propionibacterium acnes
  source 1..1473: mol_type = genomic DNA
cagatcactagtcatggcggggtgcgtgatacccggatatcggtcagtgatgacggggccactgtcacggtgaccgtctcaggtcgggccccatcgatgctggggctgcatcttccggctgtgtcgtcgacagcgtcgatgcccaaggagcgcctgtcgtgaggcgaagtgagcgcggtggagcaagtctaagcgtcgaggtgctcatgtgggcgccgatcgcgctggtgatcatcgggtttgttgtgggtatcggccggatgtcgatggcccaggacgcggtgaatggcgcggcgggtgctgcggcccgtgcggcgtcgttggagcgtgatggacagtcggctcagtctgcggcgcagcaggcggcgtcggcgaacctgtcgtccggtgggctggcatgtgcgccgaatgtgagcgtggacacgtcagtgtttgcccgtcctgccgggcaggcgggcacggttcacgccacggtcacgtgtgtcacctcgctgggtcttgggttcgggtcccggacggtgcacgcaacggggtctgccccggtagacacctatcgggaaaggagaggctgagatggcccgtgatgagcgtggtggcggctcggtgtcggtgtggatgctgctcatggtgccggtgattctggtcatggccggcctggtttttgacgggtcccgtcagatatcggcaacccaggcggcccaggacgcggcggttgcggcatcccgcgccggaactgatgcggcagcgacaccgcagcttgctggccacgacggggcggccgtagcagtccaagcggcccgccaggcactatctgctgccggggtggacgggtcggtgcaggaggacgggtcgaccatcacggtgaccacgtctcaaagtcggccgacagtgttcctgtcagcgatcggaatcagccaggtaagggggcatgggcaggcccatgctcagcttgtgggaccgggagaacgcccatgacagtgatacgtcgtatcggtgccctggtggcactgcttgtggtgatagccggcttaccggccgggctcgtggccgcaggcgccccgctagtaccggcgggcctgtcatgggcccatgtgcggcatctgttggttaccccagacatgaccgggtcggtgctggtgtggctggtcagcctcatcggctggatcgggtgggcatggttcgccctggccgtcgcagccgaagcggtgacgatgctctcagggcagcggctgcactggcacatgcccggccctcgcctagtgcgccgagtggcagccggtcttctcattgccgcgttcgcggccgcaccggcagccacaagcacggctcacgccgccgaggccacccatgtggcggtcgccgcccaggctggaccggcacacgcggcccccgcccaggacagccccgccaccacctctcaggccccggacgcctccaccactccgaaaatctggaagacctacacggtgcggg

SEQ ID NO: 345 - DNA, 1515 bp, Propionibacterium acnes
  source 1..1515: mol_type = genomic DNA
aaactggccgggatgaggatgacggccgcgccgacacttcggagcgaggtcatgtgacgatccttcggtagctcgacgggttgccgtagatcttttccacgttgatgccactatgtgggttgtcggcgctaaccatttggcctccaccgatgtagacggccacgtggtgggcagggcttccccagaggatgaggtcgccgactttgagctggtcacgggccacagcagtgccgactttctgctggtcggcggcggtgcgagggaggctaatgccgatacgccggtacagcgccgaggtcaggcctgagcagtcgtagccgccatcggctttgccgttgccaccccacacgtaggcgtaggagttgttgtcggcgatcgatttggcccatgccacggcttcggccaggttcttcgacacaccggtctcgttagcggccccggtggcacagttgtttgacaggtgccctgtagtagtggatcccactatttgtttggccatggtttcccatttggcgtaggcatcgggcagggctgagccttgcactgcctgagctgcctgcgtcagcggcatcttctgccagtcagcgatgtcgactaaaccgggaatgtggaatccagggccgccggccgatccggggccagcgtaggtgatggtgtggcctttcaagaacgcctcggtggcgtaggcatcattgttgacctgatccagagtcccgtaccagcccggcaggatgcgctgctgaaaggggccggcgtcaccgtcaccgttagccttcgctgaggtagggtcggccccaagatctgattcttgtttggcggtcatgatagcgatgaccgctgcctgggtaggcagtttgtcacgctggaccacagtgacgatggtggtcacgagctgcttctgcctggccgtgaggcctccggcacccacagtgcctccggtgacggtacccacgcaagcatccccgccgacactgccaccgccgccgccagagttgtcgtcgagggccccagagcctactgacagcagcggcacaatgatcacggtcgctggcaagaccgccaggcccgccagcatcagcactgctgcactcaccacggcgatcacgtgagatgctttcaacgctgcccacctctcgctggtttgagggggcgacgcctgctggtacgcacaggcttggttgatccagtccgccgttgattggcaggcctgggtttgatcggcttgctgggacccggtttgggctccggagtcttaggctccggcttcacatgcctaggcacttcggctgcggtgggaggagtcagcacgtggcgtaccggcttggtgaccttctgggcacccgaaacaaccggcttagacaccaccttggcacctttgaccaccggtgcggctgccttcgcgccggccttcttgactgcacgatgcgctttgatagccccggcctcggcccggccaaccctactagcagtagcatcgagggctctgtgacccgtcgttgccctcaccggtgcatc

SEQ ID NO: 346 - DNA, 1791 bp, Propionibacterium acnes
  source 1..1791: mol_type = genomic DNA
aagggtggcctggtacccggggaacccgcacccgcgaccctgtcgaactacgccaccggccaggccctcaagaactacatgaccttcatgcaccaaatctcgggtctaggtctcacatggaagtcgggagcctcaaagatcactgtggtgcgggagaaaaagggtgataccacctaccccgaggccgctatcgccttggaatcgtgcgaagacggcagctccatccgatcggtggaccgccacggacaggctgaccatggccggctcacacacgtcgacagttggtatgcccgcgataagaagggcaccatcaaaatgatcgcacgtaacggagtggaggtttcctcatgcgacgtcaagtaatcaccgcggccgtgctgggcctgaccctggccaccacctccctgcccgccctcgcagataatggagacttcagtggccatacagacacggatggtcctggttacgatgtgcgtactgaggtggattaccatcacaccaccggtggtgcgggtgggggtgccacgacagggggccatcatgggggcaaaacccacggtgatggtgaaggtgaggctattgatgggcgttctcgcgccgatgccgaagccgaactagacgaagccgaccgtaaccaggacttgacttgtgatgtcatgctcccaccggcgccgaataccccagccggccaggaatgggcgaaagaatgcaatcccccagcgaaaaaggggcagaaggccaccccgaagcccgacccggtgttagtgggccgtcacgcagccttgcagctcacccttcccggcgcggcccctcgtatcgatccgtcccccgaccttaaccggtggcactcggcagcagtgggccaggctttgtggttgtcagttgatgaccccaccgccactacacagaaatcgatcacgtttatgggccaggttgtctcgttgagcgccaaacgtaacggtttgtcgtttgatatgggtgatggtcatgtcgtgcactgtgatgccacgacgacatggacggagtcggtggaaccggggaccccctcacccacgtgcggttacacctaccaacaggcagccccggccgggggctataaggtcaccgcaatcacgtcgtgggatgtgacctggtcggtactaggacacacgggcacagtccatatcgagaaggccggtgggcagatgcttccggtcggcgagttggagtctgttgttacacggcgatgactcctgatagtccgacgctgtatgaggtgttgggggtctgccctgatgccactgatgaccagatcaagacggcgtggcgtcgtgccgcgaaagtgactcaccctgatgccggtggcactagtgaggcgttcgcggccgcccggcacgcctgggaggtgttgtctgatcctgcccggcgcaccgcctacgatgccgacctggcgggggaggatgatcccgacgacgaagccgccgacgccttcgacgttgatccgttcacggcatggccctggtgcgccccgtacatcgacgccacccccaccctgcgccacacctgccccggcacgatcaaggccatcgtggtcgccatcgccgggatcatggccggaatcggctggcaggaagcgctggaggccgtggtgtcgccgccggggtttctgggggcgtgctggatagtctcagtgccggttgtcgtcgcagtgacatggctggcagcggtgacgggtctggcatttttcaccatggcggccatctggtgtggatggtcgttgataggtggtgcgttgctgtggggccagacgtc

SEQ ID NO: 347 - DNA, 1079 bp, Propionibacterium acnes
  source 1..1079: mol_type = genomic DNA
caggtgggtttgaccgccagcgtcggattggtgctggtcgctgggctgatcaccactctcaaccgtcgttaccggacccggttcacccgtcagccccgcggcaaggccatgaccctgcccagcccggacgcccaaactgccgagatagcgctgcgcagcaccggggcgactgacactctgacgatcacctgcctcgaccaggcgctccgcgcgatcggcgcatggtgccaccactgcgggcacccgctgccacccctgctggccgcccgcgtcgatgacgaccggatcgacctgctgctatcccaggcggcccccgaccatcccgaggcggtggagctggccgccgacggatcggtgtggaccctcaccgccgaccggatcgacgacctgctagcccacaccgatgacaaccaagcggctccgtggccgtctctggtcacactgggacgcgacgacgacggcgcccacatcctcatcgacttggaagccgcaggaaccttgcacctgatcgccgatgacgaccaggtcgacgcggccctcgccgcgatcgccgtggaactggccacctgtgactggtccgacgaggtcaacgtcaccctggtcggccaggtgtgcccgggcctagaagacgcactagagtctccgaccctgacccgcgccaccgacgtggacgccctcctcaccaccctggaagctcgcgccgacgaccagcgacacatcctcaccgaaggaagccccctcgccgctcaccgagccgaccccgccatctccgacgggttcgacgccgaagtgatcctcctcgacaccgaactcaccgaagaccaccgcaaccgcctcgccagcctcgtcgaggctcttccccgcgtgtcagtcgccgcggtaacaaccagccccaccagcccagacgaatggtccctcaccctgacaggtgacccactagccgccgacgtggctcccctcggctggcacatccacccccaaaccctctcccccgacctgtacaaccgcgtggttgaactgctagacaactctgcggccgacgactacgcacccgccgactggtgggaccatgacgccga

SEQ ID NO: 348 - DNA, 593 bp, Propionibacterium acnes
  source 1..593: mol_type = genomic DNA
gctgagaaaaattttgggtccgccctgcatatcggggcctcttcataccttcaaaagtgtgaagggaatacagactcttcgactggaattaaaatggtatatggcgtgtccggtccgcacccagctccacgatgcgccatagaggagccataacttcaccaatcgtatacgatatgagtgtaggtgagcatctaccggtgaccgacagtcagatacaagcatgggcggatgaagcagaagctgattatgacctcagcatgcttccgccgtctcgacgtggtcgcccaccggtggggaggggcccgggcactgtggtccctgtgcgcttcgacgcggacactctcaaggcgttgtcacaacgagcccatgacgaaggattgaccacgcgttctgacgcgatccgtgctgcggttaaccagtggctcggcctcggctcgtaaacattatcggcgcgacaaccttactgatgacgctgttggttacgccgtagagcacatcttgtactcgtgggcgctcgacgatgctgatgatcctcgttgctggatgatgattcggtgttgacccagctggcctcctcatggagctagttatcc

SEQ ID NO: 349 - DNA, 1791 bp, Propionibacterium acnes; identical to SEQ ID NO: 346
  source 1..1791: mol_type = genomic DNA

SEQ ID NO: 350 - DNA, 1079 bp, Propionibacterium acnes; identical to SEQ ID NO: 347
  source 1..1079: mol_type = genomic DNA

SEQ ID NO: 351 - DNA, 593 bp, Propionibacterium acnes; identical to SEQ ID NO: 348
  source 1..593: mol_type = genomic DNA

SEQ ID NO: 352 - DNA, 1515 bp, Propionibacterium acnes
  source 1..1515: mol_type = genomic DNA
tggaccaggtttgcggggcatgcgcgcatcggtgatcttggccgccaccaggtgttccagattgtccaagtgcccggagtcagaggtcagcagaagagtagtcacctcgaccgcggtggctgaggcgatctgagctgtgcggcggtcgtgatgggtggtgtcagtgctgacagctgtggtgggagcggatgccggggccgccgaacggaccagggcaacggggccgcatgcgactccgcacagcacgagggcaaggaagcctttggtggccatcgatccggtgtggggccagggacccacgttttcctgtgcctgttttttcttggccgaccaacggcgggacttagggttagcggatgcaccttctggggtgcatgctcgtctcaatcgcatcggtcacctccttcactggatgaagggaccaaggaggtgaccgatgtgcggtcgaacccgaaaaagttcaaacttttttctgggtctgcctcaagtacgacagaaggcctgcatcatcacggcgttgtggtagcagatcttgcgtcagcgcaaatgcatgggcctcgtaggagtagctcttaggtaggtcccggtggttgcggccagggcgagggtgtcgggtatgtgtagcgctagtcccgggttcgtggtgtgagggcttttgggtgctgacatgcactacccattgctagacgctgtgctgtggcatggctggacgtctagcagacgggttgacatcacctttaggctggcagcgcccgaggccgcaggccagaggaagcggacagcctaacgattgacgtccccctctcctttccccaacctcctggagtcgatgacccggagatagatcgatgtctatgcatcggtgcatcgatatacctatgtatctgtctgtggtttttagaggccactcccgtcgccccgggccgctcagcgataccgcaaggctgtgtgggatcagctgtgccgctcccccgacatggcagacagcaccgttgcatgagaactgactgacactgtggcgccgcggaggtctcccgcggcgtccgctggggcgagtgcatgcctgtcagctcatcttttatcgtcatgtttccccttgtcagagcggtctttgcaaagtgacaacgtcaggggtcttgacgacaacatcctcgacaacatcgtggcggtggtctgtgtctcgtcagttcaacgcaccggggaaagaggcaccgctgatgttcaccaccacaaacaccctcaacgatgaatgggaccagattcgcgccactgagatcgattggcatgactgccctgaactgatgcactgcatcgacgttgatgatgtgttggccgtcattcctgccgcccccgacgccatcttgggctacctcattgcccgggctcagggcggtgacgagttggccacccgcactatcatccaagcgttcacaggcaagcttattttgatggccacggccaccaaggtgcgccgtactaatgacggcttcaatgatctgttggcgggtctgtggg

SEQ ID NO: 353 - DNA, 1766 bp, Propionibacterium acnes
  source 1..1766: mol_type = genomic DNA
ttaactagggtcattgtcggtgaggtgcgcggcaatgaggcctcggccatgttccaggccatgcagtcgggtacaggcaccatgagcagtatccactccccgcgagcctctgaggtgccgtcccggctagcccaaatgatttcgatgggcccggtctacgatctggatcaggccatgctgcagatcggtcattcgatcgactacatcgtctttgttcgtaagcgtgacctgcctgatgggagccggctgcgatttgttgagcagatccgttcagtctcgcctggtgattcgacaactcccagtcttggcgaggtgtacacggctgactcgtggacaggccagccgcttacgccactcatgcctggttcggccgccgacgagctgtctcacttcgcccgagacctggattactgcgaggcccactcatgaacactcccgcactaaccagcgccctcatcgtgaccgggctagggctgatcctggccatcgacgggctggtcccggcgccgcctcgacctggtgccccgctgagcccggcccaaaggtgggctcggctcacccaccgtcccactggtgcggccgggcgtcgccgggatttgcgttgggggttggctgttcttgtcggtgtcgtgctgtttgtgctcaccgggtgggtggctgcgctggcgctgggccccatcattgtgttgttggcccccaccctgctgggggcggccccaccgaccgatattccgctgatggaggcgctggatcggtgggtgcgtcaggtcgctgcggtgctgccacaggggcgagacatcatcacagcggtgcggatctcacggccgcgggccccgaagctgatcgccgggtcggtggatcaactggtgtcccggttggatggccgtatggagccgagggaggcgttccagcggatggccgacgagctggactcggctgaggctgacgcggtgctggcctcactagcgttggcggccactcatccgcggggagcctcgacaacgttgaaggctattgctggcaacatccaacagcggttgaaagtgctgcggcaggtggaggctgaacggtctaagccgcgtaactcggtgcgccagatcacactggtcacgatcgccatgttcggggggctgctcgtgatcggacggtcgtttctggccccgctggcgacccctcccggtcaggtgctggtggccgtggcggtggtcatgtatgtcatcgcactagtgcagatgtatcggatggcgcggccccgtcgacgcacccggatcatggtcaggaggacccgatgaccattactgctttgtccctgctagccggggccatcgtcactgtcggactgctggtcatcgtggcagcgttccgcccagccccaggccctgacctggttgccgctctggaggtggtgtcgggtcgcacctcaagcgtcgccgagaacgtcgaccagacccggatcgggcggataggtcgcagcgtgacccgcacattccatgtgtcggtgtccccggccatgcgggccgcactgcggctccaaggcacgacccccgaagcgttctacggtcgacgcctgatctgcgcactgatcggggcgatcctgccgtggctgctcaacgcggtagccatcgcggtaggggcgaattccccgaacctactcatcccttcggcgctgtgtgtggcgttagctggcgctggatggatgctgccggcagcacggttgaaggctgcggccgggcccaccaacgatgactcgttcgaagcgctgctgg

SEQ ID NO: 354 - DNA, 1453 bp, Propionibacterium acnes
  source 1..1453: mol_type = genomic DNA
catccgtgacaccgatctggtatcggtgactgtcggccaggtcgacaacgtatcaacggttcccgcagaccagctcgactcactggtcggcaaacgcgccacggcagatcttcgagccggatcactcttgcctgctggggctatcggcccggccgatgtcgttccagctccgggcaagtcgctggtcgggctgaagctagccgccggacagatccctatcggagaccttgctgccgggacgaagctgcgcctgatccagacgtcggcacccagcggctcatccaccaccactgatagcagcaccaataccgatggccagtcgtgggaggcaacaatggcgaccggcaccaaaaagaccgagcaggtcaccttgatcaacgccgaagtgaactcgcgtgatgccgcccggatcgcccaactgacgtcacagggccgtatcgccgtagtgaaggatccgatccgatgagcaccattgttttgaccagcgtctcgggagccccaggggtcaccacgacagcgatcgggctgggcagggtctggccacaatcgagcctggtcgtcgaggatgacacccaccacgccatgctggcgggctacctgcgagcctcccagcacgccgaaccgaacctggccgcagtggcgaacctgacgtcgactccaaccaacgcccaaacggtgtgggaatctatcgccagacccctacccaccgatgacccagtcggcgggctgcgacgcaaaggcatcctcggcccgcccacgccgtggtctcgcgcaggcatcgacccccgatggggattcatgctggccctgtggcggcaactggaggaggctggcatcgacaccatcatcgatttgggtcgcctagccacaccactgacctcaacgccacacctgatcgccgcacccatcgtcgaggacgccgacatgatcttggtgatgatcgaggcgacactacgcggcatcgccggcgcccgcacgatggtggagggactcgctgagcagatgaacttggccggcgcctaccgacgtctcggactgcttgtccaccgtggcggccaggcccgcggcgtcgccgagttcaatgacaaggagatcacctcggcgttacgactcccggtcatcggggccattacccacgacccggccggagccgcccaactctccgacggggtcgggcagcggttcgacaagtcacgtctggcccactcactatcaaaggtggcggccagcctcgtcgatgccataaacaagcgccacgctgatgacgaggaggatctgtgatggccagttttgctgataatccgttcgacaagctgcgctcccaggatgcggcaagagcttcggtagagcaggagcctgatgccggattagcgtcggagttgttttcgacgtcgtcggggtgggccagctctcagcaggtgtcccaagctcaaccggtgatgacccgttcgga

SEQ ID NO: 355 - DNA, 1466 bp, Propionibacterium acnes
  source 1..1466: mol_type = genomic DNA
tctggggagtctgggcccggaagggccacgggtcggggcaccatcgagggcagggggtggcggcgggtgacggtgatggtgtcgtgttccaggtcgaagtcgctgcgccactggccgagcatcatcgccgaggtcaccgcggccaggcgcaattggatgttcgggctggacaaatgggcgccacgttggtggtgaatggtgaagccgtccaggttcccccgatcggttttccaggaatcgacggtgaccgccgacccatagatctgagtggctacttctttagcccgttccttgtctcggtccagatcggttttgtcagggtcaggggtcggggcgcggtattgcaggacgaaccggccggccgggatcgttgcggatgtcaccgtgaactctgccggcgaccaggcagccgcggccgcctgggtgagggccattggcatggtctcgacggcagcctcctcgggggggatggtgagggtcaggcgtcgcggatgcgtcttcttgcgattccatgtgactttctgcctcaccggcaccttcgccgccgactgaatggctaggcgagctgattcggcagtttcggtacgccggccagcgcgtagcgcccgtcgtgcgtgaaggctgcccaccacagcacagcccatacacggcagccaccagcgcggatcagcggctgctgcatagcccccggtagctagtaccgcacctgaccagccggccgcgatacttttccacgccggtttcgcgccaccaggaccagcgttatggacggtctgcttcgaggctgcggagggacgagacagcggagtgctggtcatgccgcggcctccttgtggcaggtcatttcacaggcatgccggccagcgatgatgccgtggcgcaccgccccggtagccgcatagaccgcgcacaactcaaacacggggcacccatcgcaggccgccgggttcatgctttctttgtcccacgatggtgggtcatcggtgcacggcacggccaggccatcctgttgagcggcgctgatagcggtgaataggcgcagctgggcgcgaacttggtctggggtcaggttgacggtgcgggctacacgcatggggttccttcctcttcaccagtgaaggttccctagacccggccgatgtgcggagggatttcagtgttttatcgaggtgaccagccagccggtctgcgctgcgggttcaggtaccagggtcagatgcagcatggtgtggtcggctaggggcacggcgaccaggggcccgtcggcgctcgccccggtgagggtgggagttccggccacggtggtggcgggaatctggttgggtttcgcggccatcagggagcccatgagggtcggggcggcgatctggacgagggcgactttgcgggcggcgggatcgcgggtcaaccagccgcgggtgaaggtgagcgcagccgacgtgatatcggggctcagcggggctggt

SEQ ID NO: 356 - DNA, 908 bp, Propionibacterium acnes
  source 1..908: mol_type = genomic DNA
ccccaatgcccccacaacgatcagcacaccaacagcgatcatcaggtgggcagcactaactgatcccaacggaccaagatcaaacaagccctgcccgggagcgccgagcagtccgtgggcgcgaagccatgctccgagattgccaatgatcttggggatcatcttgttcagtagggctatccctccgatgccgacaacgaggaagacgaggatttcttcgcctgcgttgtttcttcctgtgtttgcggtcatgctgccttctcggggtggatggccagccagctgatgaggttgtcggtgatctgccctgagatttggatcagttcgacttgcccggcctgccatgcccgcgatgtgccggccagcaatgatgctgggacccctactgcgcggccacgggatgcaacctcagccaaggcggcgcgtaactcctcgacggtgctttcgatgtaccaactgccgtcagtactagtctcagcggcatcggtggtagcgataagagcatcggtgaggtcgtcgacggcgcggtccagatcagcgatgtccggtagggctacaggagtcatggtgtgtcttccttctagggtgccttcactggtgaagggtccctagccccggccgatgtgcggttctgtgggaaaaatgcttcccattggtccgtcttagttaggaaacttggcctaagtgctgtcgagggtcgcgtgttcgtgaccggttcgaagacactgccgccttgccttcttgtcagtggcgtttccgagatggggtcagtgggcgatggctaggccgatgagggcgccgctgcacaggctgggtgccaggggaggaatcgggtggtgtggtgtcggaaccggtcgattagggcatatagggcgatcagggtgaggccggctatgacagtgacctgg

SEQ ID NO: 357 - DNA, 1602 bp, Propionibacterium acnes
  source 1..1602: mol_type = genomic DNA
gacgccttcggcgtcgggtgagcgcgtggataggcgccccttcggggcacctgtaagcctgtatcgctgcggtttacagccttggccacccgaaaggggcggcaaggggccaggaggggcattctgcgccgctgatggcatctcacatgtgagttattctctcaactatccttcaagtcaagcgtattagattatttatccagtactcttgacagtctgtctatcgggctatatatttataagcagaacgagagatcgggaaaggaatcaacgatgaagtacaccgcacacgtcaacatggtgaccaagccctacatcggacttcccactacccgaaccccctacaccctcgtcgacgccgactgggccacaacatggatgatcgacgaaacctacgaagcccactaccacggcaccagcgtggagatcagcatctacggcgaaggccccgactgctccgtactcaccaaccgcatctacaccgaccagcccaccgatgtgaccgctgcactcgccgactacggcttcaccatcgacaccaccaacacatccaaaaccatcctcacgctcacccgcacagccaccatctcccacctgctagccatcctcgatggcctaccccaagctgaggggactcactggctcaacactcaacccgacctccaccacatcaccctcgacgactccaccaccggctgggccaccaaccgcaccgacgacaccgacaccggcgtctgctacgacaccagcacccacaactggcagatctgctgacagcatgacgggcctgcccttgaggggaagttggactctgcacccatttcagccgggtacgttgccggctgggcgaaggaagcagacggcgccgcgattgaagctgccgccgagcacgtcgcgaagacctcccacgcgattgccgaggcgttgcagctcaccgcacagtgagccccacggggcgaccggctcaccccggtcgcccctcaccccccgacaggggaaccgttcccgccgcctgaatctccatacccctgatacgtactacgcggggtcgaggagtggactcccccaccctcgtgtagtacattgtactatagacgtcttacgaggtgacaccatgagtttttccatccgtttaaccgaccatgagcgccgcttagctgattcctacgcccacctacactcgcagtccctgagtgaggctttcaagcaagccctcttcgaccgcatcgccgacgagttcgatctgcaagtagcccgtgaggcactcaccgactacgccaacgacaactaccagtctcgtcccatcagcgagctatgggacgagtgtgacctatgacttggcagatcgaaaccactagccggttcgataaagaattcaaaaagctagaccgctacacccaaaaactcattcacggctggatcacgaaaaacatcgacaacaccgacgatccccgccgccacggcaagcccctcaccggtgatctttctggactgtggcgctaccggatcggtgattatcgcctcatatgcacactcaacgatgaccgcctcatcatccttgccctgtccatcggtcaccgccgcgacatctaccgataagcc

SEQ ID NO: 358 - DNA, 1452 bp, Propionibacterium acnes
  source 1..1452: mol_type = genomic DNA
cgctgatgaggctgccgagttggcgtggcggttcgtggggtggtgtcctcagctggtaggggcaccgaagaaggtgcgtggccagctccgtcagctggtcgctgccgagatccgccggaatccgggctggctggatgcgccagcgttggaggttgttgcccagcgggtacgtgctgaaggtgcgctgggggtccagcactgcgagattgtgcgagccgagctgcacggggtgatcgccgaccagaaggccgcccccgcccgccccgacgccctgcacgcgcgggagcccaagtggtgggacgacgtgtactacgaaggaaacacaaccgtgtggtacgactctgacgaaaccagtgacgacgacgaggcgtggaaccggtcgcaggtatgtcatgttgctgagcgtgacgacatggctggcgggattgctaccaacctgctggcctcccacgctgatgatccgatggcctggctgactcgccgtcaaaccatgctgatggctcgtttcccccacgcccagaacgaggtcatcgcgatgtgccacatcgtgcgcaccgccctggaggccgacatggccgccggaacccggtgggaggactgatgagggtctcccggcgcgccctcatggccgtggcccgtgccgacgctgccgcagcagaccatgccaccggccgatgggtggccacagccaacgccaccgtcgcccggctgaccggactgtgcgaacgcaccgtccaatacgcccgcgccaccctggtccacctgggcctgtgccgcgtcgtggccaccggccgctacctcaccgccgacgagcggcgcacggctgctcgcacccatggcggccgccagatgcgcgccgcctccacccgcgtcctcaccatgtcctgcgcaatcgtttgcgccctaccccgaaggggtcaccactacaggaaagttaagttcctagatggtcaccaacgcacgcgcaggcgcgtgcgaaggccagcaacaccagagaagaaacccctgtggctgcaaaaactcgcagccctcctcgaccagcacctgccctggctggtgagaaaccatcacatcggccgactgtgccacgccctcaccgccctgggcatcgacgaacactggcaacccgcagacctcgacgccctcctcgacgccatgaaccgcaggaaccgtcgcctcggcctcgacgtgccatgcgccgacgaccagcacaaccccttgggactgttcatccaccaggcccgagacaccctcacccacgacaacccccatgaacgccgcctggcccgcgaacaccaccgcgcccaactcatcgacgaccaactccgccgccgcgcagaaaccgccacctgcgcagcccgcctcgcagccgagcacgccgaccccgactaccagacccgccgtcgtgaacgcagggaaaccctgcgagccacactcagggccgcccagcag

SEQ ID NO: 359 - DNA, 1595 bp, Propionibacterium acnes
  source 1..1595: mol_type = genomic DNA
cggcgtcgggtgagcgcgtggataggcgccccttcggggcacctgtaagcctgtatcgctgcggtttacagccttggccacccaaaggggcagcaaggggcccggagggggcattctgcgccgctgatggcatctcacatgtgagttattctctcaactatcctttaagtcaagcgtattagattatttatccagtactcttgacagtctgtctatcgggctatatatttataagcagaacgagagatcgggaaaggaatcaacgatgaagtacaccgcacacgtcaacatggtgaccaagccctacatcggacttcccactacccgaaccccctacaccctcgtcgacgccgactgggccacaacatggatgatcgacgaaacctacgaagcccactaccacggcaccagcgtggagatcagcatctacggcgaaggccccgactgctccgtactcaccaaccgcatctacaccgaccagcccaccgatgtgaccgctgcactcgccgactacggcttcaccatcgaagccgccaatacatccaaaaccatcctcacgctcacccgcacagccaccatctcccacctgctagccatcctcgatggcctaccccaagctgaggggactcactggctcaacactcaacccgacctccaccacatcaccctcgacgactccaccaccggctgggccaccaaccgcaccgacgacaccgacaccggcgtctgctacgacaccagcacccacaactggcagatctgctgacagcatgacgggcctgcccttgaggggggggttggactctgcacccatttcagccgggtacgttgccggctgggcgaaggaagcagacggcgccgcgattgaagctgccgccgagcacgtcgcgaagacctcccacgcgattgccgaggcgttgcagctcaccgcacagtgagccccacggggcgaccggctcaccccggtcgcccctcaccccccgacaggggaaccgttcccgccgcctgaatctccatacccctgatacgtactacgcggggtcgaggagtggactcctccaccctcgtgtagtacattgtactatagacgtcttacgaggtgacatcatgagtttttccatccgtttaaccgaccatgagcgccgcttagctgattcctacgcccacctacactcgcagtccctgagtgaggctttcaagcaagccctcttcgaccgcatcgccgacgagttcgatctgcaagtagcccgtgaggcactcaccgactacgccaacgacaactaccagtctcgtcccatcagcgagctatgggacgagtgtgacctatgacttggcagatcgaaaccactagccggttcgataaagaattcaaaaagctagaccgctacacccaaaaactcattcacggctggatcacgaaaaacatcgacaacaccgacgatccccgccgccacggcaagcccctcaccggtgatctttctggactgtggcgctaccggatcggtgactatcgcctcatatgcacactcaacgatgaccgcctcatcatccttgccctgtccatcggtcaccgccgcgacatctaccgctaagcc

SEQ ID NO: 360 - DNA, 1388 bp, Propionibacterium acnes
  source 1..1388: mol_type = genomic DNA
gggttgccatcggaataccgtggaccatcccggcgcatacacccagacggtccaagatccaatccacgctcacccgcgacgccgctaacgatcctcatacaccgtagatgccgttctgagagccttccagacccgcacgtgggtttattgcaccgagacccaaatcccctcagaagcgatcctgaaaccgtctacgccccatttccgacggacgctggacaggctgggcggcttgtctcccgccgcagacatggccctggcatatgcggttgccgactggtgggatcagggattggatcacacggcagacggctggtccaaggcgggtgtgcaggtgcggtgagcggcagacgtgaccggtggggtgcactgtcatggccgggcatctgccgagccaccatgcgggccctggaccaggaggcagcccgctgcgaggactgggggaagacggcggcacggatgggccgtcgggatgcggcggccgaattcaccgagactgcggtgcagcatcgtggacagatgcaccacctcatgtcggcacaaaaagtgtgggtgtcgaccgacatggtgtcggctacactggacgccgcaggagacgtgccgagtttcgaggccgtcgacgtccctgccgccgggctcatgggtttggccagccccctgccgccggttaccctgcagcatccgctgtatctgcgcagcgacgagggtgtgacaaccttcactgatccggttctcgtcgacgcgctgggatggtggatggattctgggcgtgtgcacgtggtgatgtgcacacgcacaccccggctgcccaacccggtttatgcggtggcctccccactgacggtggtggagaaaatcacggtgcccaccggcatcgagttcgagaccatggagtccaggatcctgacccccggcggcgtgacaggcgtctcacggcagggcacacgcatgatgatccggttggcgtcatggctgggtgccgcgtgggtgctcatggcgactccgacggtgtcggagccgcaccctatggatggccggtggggaggcccagcaacggggcagacccggccgcgtgatcgggtgaccgtggtcgacatgcggcccatgaggcaggtgcacaccaccaccgaccccaccggcaggcggttgacgacccggcatgtcgtgcgaggacactggacacaccaaccctacggcccggcccgcagtctccgacgcctgcagtgggtcgccccattcatccgcggccccgaaggggctccgttcgtcggcaccgacaccgtcaccgtatggcgccgctagatacgcgggcgcggggggttgacgaacgatgcccccctctttgtgttgtgatcagtcgtgatcggcgggttttaggtcggggtagg

SEQ ID NO: 361 - DNA, 1578 bp, Propionibacterium acnes
  source 1..1578: mol_type = genomic DNA
tggataggcgccccttcggggcacctgtaagcctgtatcgctgcggtttacagccttggccacccaaaggggcagcaaggggcccggagggggcattctgcgccgctgatggcatctcacatgtgagttattctctcaactatcctttaagtcaagcgtattagattatttatccagtactcttgacagtctgtctatcgggctatatatttataagcagaacgagagatcgggaaaggaatcaacgatgaagtacaccgcacacgtcaacatggtgaccaagccctacatcggacttcccactacccgaaccccctacaccctcgtcgacgccgactgggccacaacatggatgatcgacgaaacctacgaagcccactaccacggcaccagcgtggagatcagcatctacggcgaaggccccgactgctccgtactcaccaaccgcatctacaccgaccagcccaccgatgtgaccgctgcactcgccgactacggcttcaccatcgaagccgccaatacatccaaaaccatcctcacgctcacccgcacagccaccatctcccacctgctagccatcctcgatggcctaccccaagctgaggggactcactggctcaacactcaacccgacctccaccacatcaccctcgacgactccaccaccggctgggccaccaaccgcaccgacgacaccgacaccggcgtctgctacgacaccagcacccacaactggcagatctgctgacagcatgacgggcctgcccttgagggggggggttggactctgcacccatttcagccgggtacgttgccggctgggcgaaggaagcagacggcgccgcgattgaagctgccgccgagcacgtcgcgaagacctcccacgcgattgccgaggcgttgcagctcaccgcacagtgagccccacggggcgaccggctcaccccggtcgcccctcaccccccgacaggggaaccgttcccgccgcctgaatctccatacccctgatacgtactacgcggggtcgaggagtggactcctccaccctcgtgtagtacattgtactatagacgtcttacgaggtgacatcatgagtttttccatccgtttaaccgaccatgagcgccgcttagctgattcctacgcccacctacactcgcagtccctgagtgaggctttcaagcaagccctcttcgaccgcatcgccgacgagttcgatctgcaagtagcccgtgaggcactcaccgactacgccaacgacaactaccagtctcgtcccatcagcgagctatgggacgagtgtgacctatgacttggcagatcgaaaccactagccggttcgataaagaattcaaaaagctagaccgctacacccaaaaactcattcacggctggatcacgaaaaacatcgacaacaccgacgatccccgccgccacggcaagcccctcaccggtgatctttctggactgtggcgctaccggatcggtgactatcgcctcatatgcacactcaacgatgaccgcctcatcatccttgccctgtccatcggtcaccgccgcgacatctaccgctaagcc

SEQ ID NO: 362 - DNA, 1665 bp, Propionibacterium acnes
  source 1..1665: mol_type = genomic DNA
ccccaatgcccccacaacgatcagcacacccacggcgatcatcaggtgggcagcactaactgatcccaacggaccaagatcaaacaagccctgcccgggagcgtcgagcagtccgtgggcgcgaagccatgctccgagattgccaatgatcttggggatcatcttgttcagtagggctatccctccgatgccgacaacgaggaagacgaggatttcttcgcctgcgttgtttcttcctgtgtttgcggtcatgctgccttctcggggtggatggccagccagctgatgaggttgtcggtgatctgccctgagatttggatcagttcgacttgcccggcctgccatgcccgcgatgtgccggccagcaatgatgctgggacccctactgcgcggccacgggatgcaacctcagccaaggcggcgcgtaactcctcgacggtgctttcgatgtaccaactgccgtcagtactagtctcagcggcatcggtggtagcgataagagcatcggtgaggtcgtcgacggcgcggtccagatcagcgatgtccggtagggctacaggagtcatggtgtgtcttccttctagggtgccttcactggtgaagggtccctagccccggccgatgtgcggttctgtgggaaaaatgcttcccattggtccgtcttagttaggaaacttggcctaagtgctgtcgagggtcgcgtgttcgtgaccggttcgaagacactgccgctttgccttcttgtcagtggcgtttccgagatggggtcagtgggcgatggctaggccgatgagggcgccgctgcacaggctgggtgcccaggggaggaatcgggtggtgtggtgtcggaaccggtcgatgagggcatatagggcgatcagggtgaggccggctatgaccgtggcgtggatcgtgtcgatgccggttgctgcggccggggctgcccacagtggtgtgatgcgcacgtcggagaagccgaagccgcctcgggagatgagccaggcgatcatccacgccgcggagatgacgacagtagcgatagcagcacgtatcgccgcagtctggttcgcgagagcgatcatggccacagccccgatccatccaacccagccggtccaggcgaggactgccggtatccatgtggtgatggcgtcgatgacggctacccatgccccgatggtggctagcagagcccaggccggccaggtgggtgctggggcccacgctacggcggcgatcatggttgtcgcagatgcagcacagacagcgatcatgcttcggagactgtaggtgtcgcggtaggcgattttgtcgggggtggcggtggccggttcgggcaggatgcgagtgagggcaggccatcctgcggtcgcaatggtcacgacggcggcgatccacacgatctgttgcatgggtctcatcatggcccaatatcgatgggtgtgggtggccgacatggggtcactcgtagaggggatcgaggggtgtgcgggcgagcatggcttcctgtgtgccgagcatgagggtgccagaatcctcgccggctgattcccagtcgacgatgatctgcccgctgtcgacgctggattcggtgatggtcacccattctccgtcgatattgatgagcaccccagcggccagctctgtggcagcaaccgggtgagg

SEQ ID NO: 363 - DNA, 1497 bp, Propionibacterium acnes
  source 1..1497: mol_type = genomic DNA
gataccgcaaggctgtgtgggatcagctgtgccgctcccccgacatggcagacagcaccctgcggactgactgacactgtggcgccgcggaggtctcccgcggcgtccgctggggcgagtgcgtgtctgtcatctcatcttttcccgtcacatttccccttgtcagagcggtttttgcaaagtgacaacgtcaggggtcttgacgacaacatcctcgacaacatcgtggcggtggtctgtgtctcgtcagttcaacgcaccggggaaagaggcaccgctgatgttcaccaccacaaacaccctcaacgatgagtgggaccagattcgcgccatcgagatcgattggcatgactgccctgaactgatgcactgcatcgacgttgatgatgtgttggccgtcattcctgccgcccccgacgccatcttgggctacctcattgcccgggctcagggcggtgacgagttggccacccgcactatcatccaagcgttcacaggcaagcttattttgatggccacggccaccaaggtgcgccgtactaatgacggcttcaatgatctgttggcggggttgtgggagacgatcatcacgtacccgttggatcgtcgccctgacaagatcgctgcgaacctcaccctcgacacgttgcaccgggttacccggttctggcgtgctgattcccccgatgaggaagaggctcacggtctggtgcccttccctgacactctcatcgccccagagcccgatgaggacgtcacagctagccaggccatcgccttggcggtggaccgcaactggattaccgaggacctagcccgcctcatgagccatatttactgtgacggtatgactggagctgatgcgggtcgtctgcatggctgcgctccagctacggtgcgatctcgatgccgtgatggtcgggccgtgttgcagcgcaacgccgagacgatcctggccgtctgctgatcctctcttgctcatgcctgccgccaccctacccctacctgctagaaacatagccatgtctccagcaacgcatctagcatatcgtctagcaattgatctagctatgtatatagctgatgatctagctatcatatagctgtgtctccagcccaaatgacagcccaatggcatgcttgccacaggaaggtgcgtcagcctcccgaaatactggaaggagctttaccgtgcaggacatgacctcgaccagaccgattgaccgatccccgttcgaccgcaccatcgcggtatggaaccacaaaggcggcaccttcaagacgtccgtcgtggcgaacctgggatacctgttcgccgccggtggcaacaaggtgctgctggtcgacatggacccccaagccaatctcgacatcgacttcggtacccccgccaatgagcgtgaacgaggcataggattagccgaggcgctacgtgaggggacggcccttcccccaccacagcatctcagcgaaaacctccacctggtcagtggcggc

SEQ ID NO: 364 - DNA, 1374 bp, Propionibacterium acnes
  source 1..1374: mol_type = genomic DNA
gacgggttcctgccaatcgatggttgacaagtcgtcggcggcttgttggtaggtaaggtggatcattggctgtttgagtgcagcgccatgccagtgtctctggccggcgtcgatccagatggattcgcccttggtcaggtgctggggtgcttgtccttcaatatggaccagggcaacgccgcccgtgacgtagaggccctgtcccttggggtgtgtgcctcagcggcaaacgtgacggcgtgggcggcacgcccggcgtcttccgtggcacgatcggccggatccatggcggcgcgcagctgctgttctgcagccaggcgtccaggtcacggcgggcagcatcgacacccagggcagcctcgacggcttcagggctacgacgctggccgggctggttgaccgcagaccactggtgccgggcgtcgtccagatcatggccggcggcgtcgatgagggcggtggtggcttcggcgcagcatcgcctgatccactccgaacgtgacaggccagctgtctcggcggcactgtcaatgcgcgccaggagagatttcatgggcgctcatctgtagcctccagataggcgttgatgtagcgcagagcctgatccgtcatgtcgatggcggctgcctcggcagacgacacaacgggctgtggatgataagaccacccaacatagacggcgaacatcaatttctcgacagctttcatgaggtccccggcggcaaccgcatccgcctcatcatccgaggagaaccacttcaggtctgaacggctgtacatagcccctaggtcctgatgtgggtcgaggtccttggaatgatggaagttcctacacacccatcgccaaagacctcaacatggacaacgctaccttcaccactccctcatctgtgaagagccagtttatgcacggtgttgaaagaggcgtcggtctacgacgaatgcgggttaatggtcttgcggtgtggggcgctgggcgatggcatcgagaacgcgtgagtgggtggcgatccattcggccgcgtcggggttgatgttgcgggcgacggtgtcgatcgctgttacgtagtgggcaagcctgcgaatctcagcttgttggtcagggtgagcgctgatgaggggctcttgatgggaggcgcggttacggacgtggcggatgagctccacgttttcctcgaagtcgcgtcggctacgccccgggtagtgaggcatacctccgttacgtaagtcagtgagagctttccatacggttgcttccaggcgcggggtgagcagaaagcgccagttgtccagtgacagactcgccacgatctgatcaggggtcgcatcgagcctcgcgcgccgcagtcgcttctcggccctgtcgacgttacg

SEQ ID NO: 365 - DNA, 1569 bp, Propionibacterium acnes
  source 1..1569: mol_type = genomic DNA
gcccatccggtccaggcgaggactgccggtatccatgtggtgatggcgtcgatgacggctacccatgccccgatggtggctagcagagcccaggccggccaggtgggtgctggggcccacgctacggcggcgatcatggttgtcgcagatgcagcacagacagcgatcatgcttcggagactgtaggtgtcgcggtaggcgattttgtcggggctggcggtagctggttctggcaggatgtgggtgagggcaggccaccctgcggccgcgatagccatcacggcgaccacccacacaatctgttgcatgggtctcatcatggcccatcaacgccgaaaatgggtggccgacatgggttcactcgtcaagaggtgtacgggcggccgtggcttctcctgcgccgagcatgagggtgccagaatcctcgccagccgattcccagtcgacgatgacctggtcgccgtcaacgctggattcggcgatggtcacccattgcccgtccatgttgatgagcatcccggcggccagctctgtggcggcaaccgggtgggctgggctgtagaggaggtcgatgtcgcgggcagggtcgtcgggttcttcggttacctcgggtggggtcgatctggctgtctcggtgtcgtcggccaggtcggctcccaggatgcgttcccattcggggctggttttcttgcccgctgaggccatcgtctcgtcgatctgttcgtcagtgggccacacaaatttctttttggtccaggtcgtggtgtcgggtcgcagctgatccagcagttccaggtcttgcggggagtgggccttgcgggggtcgggggtgtagaagaattggacttccttgggggctgattcgccggataggtaggtgccgcggccgcgtttgccgaacgggattcccacgccgacgtgttcggagccgaacatcatgcgggctccgtcagcagacaggggtccggtggcggcacgcccggagaagttgtctcggatttcgccgcccaggaactcggcgtcggggcgttgggtccccagatcgacgtggatacggcaggcagctgccatgcgcagcagggagccgatccagccgaaaacggggcattctccgggcatcccagagaccttgatcgttgaccaccagtttttcgcgttgccgtagaactggcggtactcgtcgatgaggaccagcacgcgggtgaagtcggtctcgcgggccccttcttcttcgatgcggcggtagcggtcctccatgagagaccacagccagtggatgagggcgacctggtcggggacggtagtggcgaccatctcgatgttgggccactcccgcaggcccaggtactcgatgcgtttagggtcgatgacgaagacgcgccagttgcggcgggcaccctcgacggcgtcgccgatcatggacaccgtttttccggtacgggtgcggccggccttgagctggtgggccatgacaccggagatgtcccagaaacaggtgttgccgtcctcgtcgacggcctgggggattttctcccagtctggggagtctgggcccggaagggccacggg

SEQ ID NO: 366 - DNA, 1390 bp, Propionibacterium acnes
  source 1..1390: mol_type = genomic DNA
tgcccagcgtttctcggcgatgtcgatcatgtcttggatggttttgacccatcctcggatgggatcgactttggtcagtttgatcccttcgaggaactcgatgggctgggtgatgggcccatctggtccggcttcggtgtcccagccttcgtcgatggctagtttcagttcggcggtatcgacccatgtttcgtgggtggtgccgggcacgttgggccaaaaccatcctgctcgtcctttggtgcgtttgaccggtagtaggccgatgtcgtcccaccaggatggcacggtgaagcggatgtggtagcgggccgggtgccaggggttgttggtgaacaggtcgcgggcttcggtggcgctgagcagagtggcgggtgcggcaccgatctctccggtcactgatccggcatacatgaatcggccgtcgatgtacacgaagttagggatagggccggcaggcacggtggggcgccagcccttttcgcggtcctcggggttgccgtcgtcgacgcatagttcgtagcggtgctgaggggaggtgtgttggatgagtgcgcccagttcggggtccatcggctccatgcgataggactcgggggtccgtagcttccagaggttgattccttctgctccggggcggtccatgagggcccagtcgcggtcgattctggtggcgatgatgtgggttaattcgcgccatgcccagcgggcctggattggggtgagggtctggccagggaaccattcatcagcgaccagaatgtcgaggttgcggtcggtttctttgtgggtgaaccggcctcgggcgggccgcccggacagcatgaacaggccccgcacgtgccagtcctggttgaactcgcgggtgtgagcgggggtgtcaggcagcagccaggattgaggctggtcggggatgttaccgcagacgatcaggcgtcgggcgttgtggtgtagcgcggttgttagcaggtctgacagggtcgcgtgcttggtgcgtcgtccccccagcactggcaggatctcgtttccggccgcgtcgactccccgggcggtgtcgatgtctagccacactgtttcggggtcggggggccgatgtggggcgggacggcgctgctcctggtcgtctctcatggtttcctcctttgggccagggagcggccggcgtcgagggcgttcatgcgctcgcgttgttcttcgcgtagttggtagacccggcctcgtgacactcctgctgcctcggcgatggtggtggccggcaggtggccgatggcggcagcgtcggcaaggacgtcacgccaggccaggtcaatggttcccagctgggctagagcttcgtcgcggcggcgggtggcatcagccactacggaggcccaccctgtggggtggatgg

SEQ ID NO: 367 - DNA, 1289 bp, Propionibacterium acnes
  source 1..1289: mol_type = genomic DNA
cttcgacgctctggccgagtgggccgagagcgatgaggcgacccacaccccgcaaaccagccccgtgttccggggcaaggacgccgcgcgcgccagccgcgcattcctcggccgaggacggcccaccctcggctcagaccacgccaccggcgagggccggtcgccccgccgtcaggtacggctcgacgcacgcaccaacgcgcgactcgacgcctacgcagccgcaaccggcaccagcgcctcccagatcatccgcgacgccctcgctgactacctgcccgcctgatcccaccccaatccactcgggcgcctgtcagtgccccccttctgggtggtggtccagggcgtcaccgccccggaccagttgggtagtcatctcagttgaaataagcgattagtgatacgcccctcatgctttccggtgctgtcatgagcgtctgacaacagcgacacctcggggcagccgacggacagtcctctggctgccgctctgatcccatgcccacggcacgaaggtgtcggacagctcggtctcgtcatgtgcccaaatagcgtcgtgggcctgtcgccaagcttctcgggagccccacacgggcacgaccgggccacaccggtgtcctggtctccagtgtcgcgacactgtcgatttcggtacgtgcaatgcggcggcggtttgacggatcgacatcccagactcccgcgcgtcccagatcgccatgtggagagtatttgcctccagtgcggccgccacacttgcacgctctcgcgcacgctcgaatgcccgcctagtgctctcaaatgtcgtcacgacgcctccccctgaaaatactcagggtgtcccacggtgggacaccctgagtatttcataccccaactcgcctcaccacacgtcgacctcgacaccgatcaagcgacccgtatcagcgacattgccgtaacgctgccccgcctggtcctccagccacgacaacgcatcccgaaacagcccgacgtcttccaaagctaaaccacagtcgtagccgcccttgtcccccaaccgcacaatctggcgctcccggtggcctccctcgtcgacctcgatccacagtttcgcgtgcatccgctggcctcggccctctgacaggatctcggtgagcaggtcggacgcctgccctcgcgcatcctcgttactgcgggggaattggagtatgtgggaggaacggtggtggggcaggtttgtgacctcgtgacgcagcaggttgcgcttgtgcatctgccgttcgagacgctcgggctgacctgttgacggg

SEQ ID NO: 368 - DNA, 1226 bp, Propionibacterium acnes
  source 1..1226: mol_type = genomic DNA
ccgagccagtaaccaggaacgaggacgataggccgatgctggtcaggtcgcgatgttgaagtcatggagacatagttgcacagtgcgcggacaagggagtggcactatttctggcatgaatttagatctgggtgtccggtgaggcgatcagaacgcctccatgtactgtccgagtgtctacgatgcagcggacacagtcgagcagctggctcacaagtttccaggtgtccttctgcccctatgagggaagtcggctgctctcgcaacctttgagggctgctctggggtcggaaccagttacagatcgttcaagttccgggaactaccgccggtcacgctgattgattcccgggcgatctcgcttctgacgacagtggtcggtaaccgagaggcgtcctactctgaccccgctgctgcggtgagtaaatcacgggcgtcccggatccggccacccgtccaagtgccagccagcttgatcggctaggcatcgtcaaggagcgacgatgaggtgatgatgcgatgtgagcgcaccgcgaagtgaggtataaagaagccttcccgggcgcatgcgtcgcccaggaaggccaggttggcccctggacggctgaatggttgggcggatcaggctgtagcggagacgtgcagtacctcgtaggcgatggcgttggttggggtctggtctgcatcgtggctactgagttcgacgaggatgacggtccaggtggtgatgtcgacggcggtgacgcgggcgatggtggaatcagtggatgctgcaaggaagtcggcggttatgtcttcgatgcagtgggacggagcagtgctggtgggcaggggcacggtcttgacggtcaggcttcgggcagcagagtaatcggcggttccgttaacaagctggtggacggtccagtcctggatcgggtgccggccgaagtcgcgtacgatagccgagtaaccaagttcgccccagcagaactggcgcatcccctctatgtcgcgccagacgtagaagggcgcgtaggagttctggggtgcgcctttgaccttttcttggatgaggtaggccttgaactccagtccatggtagccgtccatgaggtgtccagtctggatgacgcggtcgcggatgatctgcatgtcatagtcggtgggcagggtgatctgatattgcatggcgtacatcagcggttctccttggtttcgtgggagtaggtcgtgggggtgacggg

SEQ ID NO: 369 - DNA, 1269 bp, Propionibacterium acnes
  source 1..1269: mol_type = genomic DNA
tagaccctctgctgagggcttcatcaagatccatcacgaccttattagtgtcggcgtgtcgggtaacgcgatggcgttgttcgtcgcgttacgtaaccagcccggctgtgatcagtggacccgtcactcgtacctgcggctagcccaatggtgcggctgggatgggctgtcggaggcggcgggctgtaagcgggtgcagcgggccgctgctgagctcgctagcggtggttggctggaatcgcgggtcggccatgatcgtcgcaccgctaagacgctggtgtggcatcggttgaccagccccgacaccgaccgctgggagcaattgccgcggattgtgtgggcgaggatctgccagatcgccggggagacgtcgggagagtgggtgaggcattggctggtgtggcggatgctggccggtcgtactggtgtggctcaggcccctacgtccatcgtggcccggttcctgggctgttcttcgcgccaggtctctcatatccgtggggctctcgttgatgccggtctgctcggctgtgacgaggtctcgggggcggcgagccgggtgtggttcccctcgatggccgaggagtgtgcagcggatcgtgaggtggtcgatggggccgtcgtcgatgctgaggtgggctctggtgaaggtgtcgaggagggcggggaacccctgtcgattttgtccacccacccctgtcgattttgtccacccacccctgtcgattttgtccgccaagtattagacaaaccattagacagtgaattagaccctgggtcgcgtcagcgtgtgaactcaccaacgcgcgcgcgcgcggcggccgagccgccgaagccaaagaaacccataccaccaacgcctgaaccagcagcccccgcttcagacagtcctgtgtcagcgcacgctgatgaggctgccgagttggcgtggcagttcgtggggtggtgtcctcagctggtaggggcaccgaagaaggtgcgtggccagctccgccagatggtcgctgccgagatccgccggaatccgggctggctggatgcgccagcgttggaggttgttgcccagcgggtacgtgctgaaggtgcgctgggggtccagcactgtgagattgtgcgagccgagctgcacggggtgatcgccgaccagaaggccgcccccgcccgccccgacgccctgcacgcgcgggagcccaagtggtgggacgacgtgtactacgaaggaaacacaaccgtgtggtacgactctgacgaaaccagtgacgacgacga

SEQ ID NO: 370 - DNA, 1195 bp, Propionibacterium acnes
  source 1..1195: mol_type = genomic DNA
gaacgccaccgtgttgcctttctgatcctgagtgtcggcatgcaaatcgaggtaggccagcgactgcaacggggagcctgtgaccacagccaacgggatgccggtggtacggcccaaccggtactcaaccaccgggatagatgcggcgaacgcggaggcgtgagtcagctgacggtaggcgttaagcgaggaggagaaccggccaccgggccgggcagcccacagcaagtcctcctgacggcccacgggacgcacccacgtgaagtcaccgaacaccggatcattgacgaacgctcctgccagctcctcggtggtctcaaagtcaggagacgagacagtgacggtgataagagcctggatctcgacctcacgctcatcggcggccagctcggcgttgtagtcgacgagcacctgagcggaatgctcgatagacatgagggtcgaagcctgggtcatctcaccgccctcgacgttgtcgagctgatcgaccgtttgacggatagcccgctgatttttctgcatcgcagcgtgacgggtccgggccactccccggatcgccacgtcgaccggcacgccagtgtcgtcgatacggcccaaaaactcgtaggcaggccacgtcatcgtgcggggcaccttacccagcacgatatgggactggtagacggtctcgccggtgtcggcaccgattttgaggacgcgacgattccacgcctgagccgtccgggacatgtgggagactcgcttgtcatcctcgctggccagcaggtcggaggtcgcggcctcatcgatgaccaactcccccagcgcggcacgtccaacctcatccatgagggcgattccctcgccaggggcatcatcacgcaaccgggtcgggtggcctgacaggtgctgccgaagccagatctgttcatcaacggtgaccgggcggggttggaacgctgccggcagtttcgcaccgaattccttagcctgacggagggcccactcccgtgcgacacggccaggagcggtggtcatgagtccggcggcttcggtgattttgttgagggcggcggtccaggcggtgtgggtgcgtattttctggtcttggttgagtttgatcgataggaaccacacgcgccggcctagggattcggtttcaggctggtcgagggtggcgtcgatttcgtcggcccacacggggtgttcgctcagg

SEQ ID NO: 371 - DNA, 1199 bp, Propionibacterium acnes
  source 1..1199: mol_type = genomic DNA
acccttccagcccagcaccacccactacaccgacacgatccacgaagctgaaaccgaacctcccatccccgtccgaaacatcaacgaactcatcaaccccaccaaccatgcatgaacgcacgatcgcctaccggccagccttcctgcgcgacgtgaagcggctcaaaaacaagcactacaacatgaacacacactcaaatgggcggtaaggtcacgaagtcgacgtggctgcctcacggatggcttcggcgagctcttggggtcgactccacatgggccagtggccggttggcagatccatcgcggtgaagttggtcaggtgcgcgacggcgctgaacatcggattgcctgctgcggccagctcgaggacctggacgctgggaatggagcagcagatcaacgtggttagtacatcatggcgagcgctattggacagcgcgacccgtgcccgggccacttgcgcgggttcaggaaccgcccgtgcccggaaccggtcaaggtgctcgttgctgaggccctctaaactggcctgcttgccgagagtatcgaagtcaggaagtggcagctcagctgtttcctcaggtagatctggtgcgaaggcacctccatcgctcatgggaccggagtccacccagacgatccgatggaccaactctgggtgcctgtctacaactaggctcaccggcccgttcgcgccactgtgtcccaccaggaccgcatcgccgcccatctcgtccaggatggctgagatggcgtcagcttggtcgtcgagcgtgcgcgtagtgcgctgggtgtcctccggatcgagacctggcagcgtcagccccacggctcgactgccagcagtgttcaataactcgactacctcgtcccaagcccaggctccgagccagtaaccaggaacgaggacgataggccgatgctggtcaggtcgcgatgttgaagtcatggagacatagttgcacagtgcgcggacaagggagtggcactatttctggcatgaatttagatctgggtgtccggtgaggcgatcagaacgcctccatgtactgtccgagtgtctaggatgcagcggacacagtcgagcagctggctcacaagtttccaggtgtccttctgcccctatgagggaagtcggctgctctcgcaacctttgagggctgctctggggtcggaaccagttacagatcgttcaagtt

SEQ ID NO: 372 - DNA, 813 bp, Propionibacterium acnes
  source 1..813: mol_type = genomic DNA
cgattttgtccacccacccctgtcgattttgtccgccaagtattagacaaaccattagacagtgaattagaccctgggtcgcgtcagcgtgttagctcaccaacgcgcgcgcgcgcggcggccgagccgccgaagccaaagaaacccataccaccaacgcctgaaccagcagcccccgcttcagacagtcctgtgtcagcgcacgctgatgaggctgccgagttggcgtggcagttcgtggggtggtgtcctcagctggtaggggcaccgaagaaggtgcgtggccagctccgtcagctggtcgctgccgagatccgccggaatccgggctggctggatgcgccagcgttggaggttgttgcccagcgggtacgtgctgaaggtgcgctgggggtccagcactgcgagattgtgcgagccgagctgcacggggtgatcgccgaccagaaggccgcccccgcccgccccgacgccctgcacgcgcgggagcccaagtggtgggacgacgtgtactacgaaggaaacacaaccgtgtggacgtacgactctgacgaaaccagtgacgacgacgaggcgtggaaccggtcgcaggtatgtcatgttgctgagcgtgacgacatggctggcgggattgctaccaacctgctggcctcccacgctgatgatccgatggcctggctgactcgccgtcaaaccatgctgatggctcgtttcccccacgcccagaacgaggtcaccgcgatgtgccaaatcgtgcgcaccgccctggaggccgacctggccgccggaacccggtgggaggaccgatgaggg

SEQ ID NO: 373 - DNA, 1204 bp, Propionibacterium acnes
  source 1..1204: mol_type = genomic DNA
ccggagtatctggacaaggccgtgctcactgcgttgtatcccgatgggttgcccttcgacgaggacaccgaggagccgggcgagaatgccgggcaggaggagcttgcgatgactggatgagcccgaacatggttgaaggccgccccgccaggcgaccttcaatcaatggtttcggttgtcagctgcagccacccttgccaggtgctgtggttcttctccagaggaggagggaccgccatgaagacccagaagatctagaagatccaaaagaaccggtttcggctgttgcttcggtcttcatggtagctgatagcccgcgtcgttggaagtgcgacgacgccgatcctcatcggtatcgcaccctgttccagggtcgagaatgtgaaggattaacaaccatgacaagtcatgagacgccctccctgagggcgtcatgaccgctttaattcaagctctgccgacagctgaactgtctgctggacctggtgctagcagtccagctagaccctctgctgagggcttcatcaagattcatcacgaccttattagtgcgggcgtgtcgggtaacgcgatggcgttgttcgtcgcgttacgtaaccagcccggctgtgatcagtggacccgtcactcgtacctgcggctagcccaatggtgcggctgggatgggctgtcggaggcggcgggctgtaagcgggtgcagcgggccgctgctgagctcgctagcggtggttggctggaatcgcgggtcggccatgatcgtcgcaccgctaagacgctggtgtggcatcggttgaccagccccgacaccgaccgctgggagcaattgccgcggattgtgtgggcgaggatctgccagatcgccggggagacgtcgggagagtgggggaggcattggctggtgtggcggatgctggccggtcgtactggtgtggctcaggcccctatgtccatcgtggctcggttcctgggctgttcttcgcgccaggtctctcatatccgtggggctctcgttgatgccggtctgctcggctgtgacgaggtctcgggggcggcgagccgggtgtggttcccctcgatggccgaggagtgtgcagcggatcgtgaggtggttgatggggccgtcgtcgatgctggggtgggctctggtgaaggtgtcgaggagggcggggaacccctgtcgattttgtccacccacccctgtcga

SEQ ID NO: 374 - DNA, 1288 bp, Propionibacterium acnes
  source 1..1288: mol_type = genomic DNA
ccgaactcaccgaagaccaccgcaaccgcctcgccagcctcgtcgaggctcttccccgcgtgtcagtcgccgcggtaacaaccagccccaccagcccagacgaatggtccctcaccctgacaggtgacccactagccgccgacgtggctcccctcggctggcacatccacccccaaaccctctcccccgacctgtacaaccgcatggttgaactactcgccaactccgccgccgcagactacgaacccgccagctggtggaaccacgacgccaacgacgagcccaccaccgaccccaccaacgaggaagaatctaccccgagcaggcgagcccgcccgaatatccgcctgaccaccctgaccggcggcatcgacctatccagcgtcgacatcgacgacatcatcgacgaagccaaccaggccctcgacaacaccgaccaggccaccaaccaggttcgtgtcgacaccgaccaacccggcaccgacacccccttccccatcgacgacatcgacccgctgagctccgaccatccggtcctatccatcatcggccaccccgacatcacaggtgccactggaaccgttgggcgctccccgtggcgctgccaacagttggccctctacatcgctgagcatccgggagcatcgggggcgactatcgccgatgatttggggctatcagcgtcgacggtgcgctcgattgctacacacctgcgacactggttgggagccgatgatgccggggtggcttacatgccggcggcgacgcgcggctaccggctcgatgagcggatcgtcacagatgtggacctgatcgacgctgctgtggccggggcaggcattaacaccgctgagacggccacactggtggccattttgaagctgggccgcggacgggtcttcgctggggttcctgactcggaacttcgccagttcagggcgtcgatgtaccacgtggaggcccgcatcgtcgatgctgccctccaagtgacagaccgggccctggaagccggggacctggggctggcccggtgggcgttgacccaagggctactggtgtctcccgatcatgaggacctggtcgccggttgtctgcgcaccgagtaccaggccggcaacatggacaaggtcgccgagctggtcgatcacctgtcggctaccgcacgccgactgggcgtcgacctcaacgaggacaccacccggatcatcgatacggtcacccacaccgacaggagagcgtcatgatctcccctgcactcatctccgtcaggaaggttcctatgcaccat

SEQ ID NO: 375 - DNA, 1239 bp, Propionibacterium acnes
  source 1..1239: mol_type = genomic DNA
aaaagaagaaacccaccaaccacgaaccatccgcaatatcgccggcgtaatccgacaacccctcatcacagtcaccaaggtcgtcgcgagcatccgagacgtcatcgtaagggccacccttgagcacctcgatgtacttgtcgtggcacttcgcatcaataatccggccatagttgagctgctgatgaaccggcgccacgaacgagtccacaatgatcgccgacagcttcggatccttcgagtctcccgtcgaggtcatgtcatcaggaatctcgacctcaccagcggtcgccgtcgcaggatcaaccgaactagtaatcatccgagacagcgccacaccgaactgctgggtgcgagccaacggagtagccaacgtcgtcgtatcgcctgcgaacttcgccaccggggccgccaagaaacccaacgccagcgccgcagcaatcgccgcacgcgcacccgtagcccacgccccagccgtacgtcccctcatcatcttgacgaccacgcccacaccggcgcacgtcgtcagcaacgtcaacaccgttccaccccagctgtccgctcccagcggggccaaaaccttgtcgtggatatcgttctgcaaccccaccagcgggccggtaatccacccgacccagctcatcgccacggtccagtccaacaaccggcacagcaacgcaatgaccatcaggtacgtgttccaacacataccaataatggaggcccacatagccttcaacggggccgtaacgccaccatcgtccatcgacatctggtactgaaacaagtgaataccgttggagtcagtcacattgaaaccgtcacccatccagcccagccccgggcccgacgccatagcaggcacactgctcagcgccaccaccaaaaccagcgtggtgacgatgatacggaaccaccgctccccggccccggggcggcgtggatgacggctcacgctgtctcccggtcgtgctcgggcgggttggagctggcggcttcgcggtggggagcgtaggcaggtctcagtagtcgaatttcaccgacgttgccgtgctgatcggcgtacaggccacaaccggggcctccggggttgagggcaatcttgaccaggtcagcgaactcttcaggggacgttttagggtccacgcccaggaactcgacacctttctgggcgaggttgatgttgtcgcacagcaacacgatgcgatgctgaatgaggttgcggacggtctcgttggg

SEQ ID NO: 376 - DNA, 1232 bp, Propionibacterium acnes
  source 1..1232: mol_type = genomic DNA
  variation 28: note = a, c, t, g, unknown or other
gcatcgatatatctatgtatctgtctgnggttttttagagggcccactcccgtcgccccgggccgctcagcgataccgcaaggctgtgtgggatcagctgtgccgctctcccgacatggcagacagcaccctgcggactgactgacactgtggcgccgcggaggtctcccgcggcgtccgctggggcgagtgcgtgtctgtcatctcatcttttatcgtcatgtttccccttgtcagaggggtctttgcaaagtgacaacgtcaggggtcttgacgacaacatcctcgacaacatcgtggcggtggtctgtgtcttgtcagttcaacgcaccggggaaagaggcaccgctgatgttcaccaccacaaacaccctcaacgatgaatgggaccagattcgcgccatcgagatcgattggcatgactgccctgaactgatgcactgcatcgacgttgatgatgtgttggccgtcattcctgccgcccccgacgccatcttgggctacctcattgcccgggctcagggcggtgacgagttggccacccgcactatcatccaagcgttcacaggcaagcttattttgatggccacggccaccaaggtgcgccgtactaatgacggcttcaatgatctgttggcgggtctgtgggagacgatcatcacttacccgttggatcgtcgccctgacaagatcgctgcgaacctcatcctcgacacgttgcaccgggttacccggttttggcgtgctgattcccccgatgaggaagaggctcacggtctggtgcccttccctgacactctcatcgccccagagcccgatgaggacgtcacagctagccaggccatcgccttggcggtggaccgcaactggattaccgaggacctagcccgcctcatgagccatatttactgtgacggtatgactggagctgatgcgggtcgtctgcatggctgcgctccagctacggtgcggtctcgatgccgtgatggtcgggccgtgttgcagcgcaacgccgagacgatcctggccgtctgctgatccctctcttgctcatgcctgccgccaccctacccctacctgctagaaacatagccatgtctccagcaacgcatctagcatatcttctagcaatttatctagctatgtatatagctgatgatctagctatcatatagctgtgtctccagcccaaaatgacagcccaatggcatgcttgccacaggaaggtgcgt

SEQ ID NO: 377 - DNA, 1200 bp, Propionibacterium acnes
  source 1..1200: mol_type = genomic DNA
ccggagtatctggacaaggccgtgctcactgcgttgtatcccgatgggttgcccttcgacgaggacaccgaggagccgggcgagaatgccgggcaggaggagcttgcgatgactggatgagcccgaacatggttgaaggccgccccgccaggcgaccttcaatcaatggtttcggttgtcagctgcagccacccttgccaggtgctgtggttcttctccagaggaggagggaccgccatgaagacccagaagatctagaagatccaaaagaaccggtttcggctgttgcttcggtcttcatggtagctgatagcccgcgtcgttggaagtgcgacgacgccgatcctcatcggtatcgcaccctgaaacagggtgttgaacatgaaggattaacaaccatgacaagtcatgaggcgtcctcccggagggcgtcatgaccgctttaattcaagctctgccgacagctgaactgtctgctggacctggtgctagcagtccagctagaccctctgctgagggcttcatcaagattcatcacgaccttattagtgcgggcgtgtcggggaacgcgatggcgttgttcgtcgcgttacgtaaccagcccggctgtgatcagtggacccgtcactcgtacctgcggctagcccaatggtgcggctgggatgggctgtcggaggcggcgggctgtaagcgggtgcagcgggccgctgctgagctcgctagcggtggttggctggaatcgcgggtcggccatgatcgtcgcaccgctaagacgctggtgtggcatcggttgaccagccccgacaccgaccgctgggagcaattgccgcggattgtgtgggcgaggatctgccagatcgccggggagacgtcgggagagtgggtgaggcattggctggtgtggcggatgctggccggtcgtactggtgtggctcaggcccctacgtccatcgtggcccggttcctgggctgttcttcgcgccaggtctctcatatccgtggggctctcgttgatgccggtctgctcggctgtgacgaggtgtcgggggcggcgagccgggtgtggttcccctcgatggccgaggagtgtgcagcggatcgtgaggtggtcgatggggccgtcgtcggtgctggggtgggctctggtgaaggtgtcgaggagggcggggaacccctgtcgattttgtccacccacccctg

SEQ ID NO: 378 - DNA, 1271 bp, Propionibacterium acnes
  source 1..1271: mol_type = genomic DNA
gttgagggcgtgggatcagggtgaaggcagccaaactggccgggatgaggatgacggccgcgccgacacttcggagcgaggtcatgtgacgatccttcggtagctcgacgggttgccgtagatcttttccacgttgatgccactatgtgggttgtcggcgctaaccatttggcctccaccgatgtagacggccacgtggtgggcagggcttccccagaggatgaggtcgccgactttgagctggtcacgggccacggcagtgccgactttctgctggtcggcggcggtgcggggaaggctaatgccgatacgccggtacagcgccgaggtcaggcctgagcagtcgtagccgccatcggctttgccgttgccaccccacacgtaggcgtaggagttgttgtcggcgatcgatttggcccatgccacggcttcggccaggttcttcgacacaccggtctcgttagcggccccggtggcacagttgtttgacaggttccctgtagtagtggatcccactatttgtttggccatggtttcccatttggcgtaggcatcgggcagggctgagccttgcactgcctgagctgcctgcgtcagcggcatcttctgccagtcagcgatgtcgactaaaccgggaatgtggaatccagggccgccggccgatccggggccagcgtaggtgatggtgtggcctttcaagaacgcttcggtggcgtaggcatcattgttgatctgatccagagtcccgtaccagcccggcaggatgcgctgctgaaaggggccagcgtcgccgtcaccgttaggtttcgtggaggtggggtcggctccgagatctgattcttgtttggcggtcatgatagcgatgaccgctgcctgggtaggcagtttgtcacgctggaccacagtgacgatggtggtcacgagctgcttctgtctggcggtgaggcctccggcgccgaccccgccgccggtgacagttcccatgcaggcatccccgccagcgcctccaccagagttatcgtcgagggccccagagcctactgacagcagcggcacaatgatcacggtcgctggcaagaccgccaggcccgccagcatcagaactgctgcactcaccacggcgatcacgtgagatgctttcaacgctgcccacctctcgctggtttgagggggcgacgcctgctggtacgcacaggcttggttgatccagtccgccgttgattggcaggcctgggtttgatcggcttgctgggacccggtttgggctccgg

SEQ ID NO: 379 - DNA, 1100 bp, Propionibacterium acnes
  source 1..1100: mol_type = genomic DNA
aggcgagccagacgggcaataagcgcgtagagggctcggccaaacaccttgtgcgggggcagctgccgaaacaaatgttctgacagcatctcctcggcgttaggaagagcgatgccacaagtgccaatgatgaggatgtcggcactcaggtcggcgggaggaaggtccgggtcaaagatggccgaagctagggaggccgagttctcgatgtcagcgaacacggcaatcctgtcagcgatcgcggtggcctcgggaaggtcgcactcctcggccaggtggcgggccaaacgcccacacgaggtgatctggtggtcacgcatgtaggccggtttgaggaccttggccagcgtggtcccggccacaccgatggtctccaagttaagcaaggtcagcaagaacgactgggcgacctgcccggccatctccgggggaaggatgcgcagcgggtccagcgacagcttggggtgggccgtgtcgacgatctggcgtctaaccccgtcgatagagttgacaaaggttacccactcccgctcatcggagttgtcggtggcaataatgcgcccgccccgggccgcgatggctgcgcacagccgcttctcggccatcgtcttgcccgcgcccatcttgccgatgaacgccaccgtgttgcctttctgatcctgagtgtcggcatgcaaatcgaggtaggccagcgactgcaacggggagcctgtgaccacagccaacgggatgccggtggtacggcccaaccggtactcaaccaccgggatagatgcggcgaacgcggaggcgtgagtcagctgacggtaggcgttaagcgaggaggagaaccggccaccgggccgggcagcccacagcaagtcctcctgacggcccacgggacgcacccacgtgaagtcaccgaacaccggatcattgacgaacgctcctgccagctcctcggtggtctcaaagtcaggagacgagacagtgacggtgataagagcctggatctcgacctcacgctcatcggcggccagctcggcgttgtagtcgacgagcacctgagcggaatgctcgatagacatgagggtcgaagcctgggtcatctcaccgccctc

SEQ ID NO: 380 - DNA, 1109 bp, Propionibacterium acnes
  source 1..1109: mol_type = genomic DNA
cccctaggtcctgatgtgggtcgaggtccttggaatgatggaagttcctacacacccatcgccaaagacctcaacatggacaacgctaccttcaccactccctcatctgtgaagagccagtttatgcacggtgttgaaagaggcgtcggtctacgacgaatgcgggttaatggtcttgcggtgtggggcgctgggcgatggcatcgagaacgcgtgagtgggtggcgatccattcggccgcgtcggggttgatgttgcgggcgacggtgtcgatcgctgttacgtagtgggcaagcctgcgaatctcagcttgttggtcagggtgatcgctgatgagaggctcttgatgggaggcgcggttacggacgtggcggatgagctccacgttttcctcgaagtcgcgtcggctacgccccgggtagtgaggcatacctccgttacgtaagtcagtgagagctttccatacggttgcttccaggcgcggggtgagcagaaagcgccagttgtccagtgacagactcgccacgatctgatcaggggtcgcatcgagcctcgcgcgccgcagtcgcttctcggccctggcgacgttacgcgggaaaccaccgagccgatagctcggggattcccaccaacgccgtatgccagtatcggcgctcaggcgcacgtcaatgaagtttctcaggagtacctcgacatggctgatgtcttccaagaacgctttcgagatgcgggtgttccacacgtaccacgcatcgactggttcgatccggtagcggctgagcctggcgggtgagaaccactcctgcaacgtctcacgactcaccgtgggagcgtggtaggattgatgacgataggcctcgggaaggtcaatgccgcgaaatatcggtatacccccgaggtcattgttttgcccaggcccctcctcgcatacttgcggggcgtcattggctgccgtcatctcgtctcttcccggtacgtggctgtccatgttcacgggcaggtacggcaatgaggttcccgcacacaaacctctaccaagcatacgctggcaagccccgacgagacgacgcctccgcccgccacaccaacggtcaccgccccggccacgg

SEQ ID NO: 381 - DNA, 1033 bp, Propionibacterium acnes
  source 1..1033: mol_type = genomic DNA
ccacggtgacctgccacaggctcggatcagacggggagacggtagcgtcataggcggtgacggtggtgggcgctggaccaggtttgcggggcatgcgcgcatcggtgatcttggccgccaccaggtgttccagattgtccaagtgcccggagtcagaggtcagcagaagagtagtcacctcgaccgcggtggctgaggcgatctgagctgtgcggcggtcgtgatgggtggtgtcagtgctgacagctgtggtgggagcggatgccggggccgccgaacggaccagggcaacggggccgcatgcgactccgcacagcacgagggcaaggaagcctttggtggccatcgatccggtgtggggccagggacccacgttttcctgtgcctgttttttcttggccgaccaacggcgggacttagggttagcggatgcaccttctggggtgcatgctcgtctcaatcgcatcggtcacctccttcactggatgaagggaccaaggaggtgaccgatgtgcggtcgaacccgaaaaagttcaaacttttttctgggtctgcctcaagtacgacagaaggcctgcatcatcacggcgttgtggtagcagatcttgcgtcagcgcaaatgtatgggcctcgtaggagtagctcttaggtgggtcccggtggttgcggccagggcgagggtgtcgggtatgtgtagcgctagtcccgggttcgtggtgtgagggcttttgggtgctgacatgcactacccattgctagacgctgtgctgtggcatggctggacgtctagcagacgggttgacatcacctttaggctggcagcgcccgaggccgcaggccagaggaagcggacagcctaacgattgacgtccccctctcctttccccaacctcctggagtcgatgacccggagatagatcgatgtctatgcatctgtgcatcgatatacctatgtatctgtctgtggtttttagaggccactcccgtcgccccgggccgctcagcgataccgcaaggctgtgtgggatcagct

SEQ ID NO: 382 - DNA, 1171 bp, Propionibacterium acnes
  source 1..1171: mol_type = genomic DNA
ccagcccgacagccatgccagaggtgaccaggtccagtcgatgcgaccaacaacgaactgggcgagccatccggcagccagcgcgaaaatgaaaccgcggatggtcatgcccccgtcgataattttgaagcccatcatcgcggcaggaactacgccgccgacagcgagcacctgatagatcgtgtagggcccgccaggaatccttcgacctgaggagtccttgccgataatgcggggctgctggcgggcctcggtgtgccactgaatatccacgatcagctcttgcccaatccttgcatcatctgtccgaagaattggatcgcgttaccttcgataagccagtgcgccataccacacacaaacagcatggagacgatcttggccaggctcataccgtgtttgaagatgttgaacgcggcaatgcccacgactacgaccatggcgacggctcgcaccgcggactgaccttcacctgccttgatcgtcgtccattcgaagaggttctgcgattccagtggcagcaggaggaattgatcgagcatgagaggttttcctttcaggaagccgaccgggatggtcccggtactgacgggctggacggcacgggtgtgccggccaggggcagaaggcgtgacggctggtcgagggaggcaacctcccagcggcctgcacggctgacaagagtcaggccgtactggctgggccgggtagtggattcgtcaccggttagctggcatgtcacggtcaccgtgacggtaatcttctgccggtctgagggggtggggacctcgtcaggtcccaccacatgagtggttttcactgatacgcatggggctgggtcaaccgcggtgaaagcggtccccgggctactccatctcgacaggtcgtcgctgccactcagcatcgcggccaagaaacccgaagaggtctgggcagccgggtcagcaggacgaatctccgaggagtccacgtcgggggctgaggccggtgcaggcatggggatctgcccaggtagacgcaaggcgatggccttgccgttggaatcgacgtggaccgggactgaccaggcctgtccgctcccggattggccgcccatggtgaccacggtgacctgccacaggctcggatcagacggggagacggtagcgtcataggcggtgacgggggtggg

SEQ ID NO: 383 - DNA, 1042 bp, Propionibacterium acnes
  source 1..1042: mol_type = genomic DNA
attatcggcgcgacaaccttactgatgacgctgttggttacgccgtagagcacatcttgtactcgtgggcgctcgacgatgctgatgatcctcgttgctggatgatgattcgtgttgacccagctggcctcctcatggagctagttatcctcatctacgacgatggctatgaactcctgatccacgccatgaaagcccgccctcagtatctgagctacttcgctatctagtgttgttgggcgagttgaactcaacttttctccgacgcaagcgccaataaaaggctgatccatccgaataccaccaaacacggctgaagtgtggaacagattcagcaagacagggtgcggtgctcgggtgcgttggggagatgaggatattcaggcttctggcgggatgtggcttgatgacgtccaggatcaccggttcggttttgaaggtgccttgcattaatgtcgacagggtcgtacgactcgaggattggatcgaccagcccgttgcgtctgaagaacttcatccaccccggtggagctccggccgcgtactggtgcaacggatcattagcatgggtagcgtgagtatgccttcgatcgtggtcagtgctgtcatcatccaagattctgacgggcggcttctcactgtccgtaaacgaggcaccgaggcattcatgctgccaggcggcaagccggagcccggcgaggactcgcgtcaggcagtagtccgggaagtgcacgaagagctcggcgtcgcattgtcttccgacgacctgcgtcgggtgggagtgttcaccacgcgagcagcgaatgaggccggccatcaggtggtggcgacgattttcacccacaccccggttgcggtgagtgagccagctgctgagatcgagcagattcgttggctcgattggagtgtcgacgccctgcctgacgacctggccccgctgctggtcgaggcagtcatcccgtggctgcggcgccgtatccggtcggtcgctgtattcacgggtgcgaaggatggaaccgaccctcattatcgtgtcgaagca

SEQ ID NO: 384 - DNA, 1057 bp, Propionibacterium acnes
  source 1..1057: mol_type = genomic DNA
cccctaggtcctgatgtgggtcgaggtccttggaatgatggaagttcctacacacccatcgccaaagacctcaacatggacaacgctaccttcaccactccctcatctgtgaagagccagtttatgcacggtgttgaaagaggcgtcggtctacgacgaatgcgggttaatggtcttgcggtgtggggcgctgggcgatggcatcgagaacgcgtgagtgggtggcgatccattcggccgcgtcggggttgatgttgcgggcgacggtgtcgatcgctgttacgtagtgggcaagcctgcgaatctcagcttgttggtcagggtgagcgctgatgagaggctcttgatgggaggcgcggttacggacgtggcggatgagctccacgttttcctcgaagtcgcgtcggctacgccccgggtagtgaggcatacctccgttacgtaagtcagtgagagctttccatacggttgcttccaggcgcggggtgagcagaaagcgccagttgtccagtgacagactcgccacgatctgatcaggggtcgcatcgagcctcgcgcgccgcagtcgcttctcggccctggcgacgttacgcgggaaaccaccgagccgatagctcggggattcccaccaacgccgtatgccagtatcggcgctcaggcgcacgtcaatgaagtttctcaggagtacctcgacatggctgatgtcttccaagaacgctttcgagatgcgggtgttccacacgtaccacgcatcgactggttcgatccggtagcgtctgagcctggcgggtgagaaccactcctgcaacgtctcacgactcaccgtgggagcgtggtaggattgatgacgataggcctcgggaaggtcaatgccgcgaaatatcggtatacccccgaggtcattgttttgcccaggcccctcctcgcatacttgcggggcgtcattggctgccgtcatctcgtctcttcccggtacgtggctgtccatgttcacgggcaggtacggcaatgaggttcccgcacacaaacctctaccaagcatacgctggcaagcccc

SEQ ID NO: 385 - DNA, 1057 bp, Propionibacterium acnes
  source 1..1057: mol_type = genomic DNA
cccctaggtcctgatgtgggtcgaggtccttggaatgatggaagttcctacacacccatcgccaaagacctcaacatggacaacgctaccttcaccactccctcatccgtgaagagccagtttatgcacggtgttgaaagaggcgtcggtctacgacgaatgcgggttaatggtcttgcggtgtggggcgctgggcgatggcatcgagaacgcgtgagtgggtggcgatccattcggccgcgtcggggttgatgttgcgggcgacggtgtcgatcgctgttacgtagtgggcaagcctgcgaatctcagcttgttggtcagggtgatcgctgatgagaggctcttgatgggaggcgcggttacggacgtggcggatgagctccacgttttcctcgaagtcgcgtcggctacgccccgggtagtgaggcatacctccgttacgtaagtcagtgagagctttccatacggttgcttccaggcgcggggtgagcagaaagcgccagttgtccagtgacagactcgccacgatctgatcaggggtcgcatcgagcctcgcgcgccgcagtcgcttctcggccctggcgacgttacgcgggaaaccaccgagccgatagctcggggattcccaccaacgccgtatgccagtatcggcgctcaggcgcacgtcaatgaagtttctcaggagtacctcgacatggctgatgtcttccaagaacgctttcgagatgcgggtgttccacacgtaccacgcatcgactggttcgatccggtagcggctgagcctggcgggtgagaaccactcctgcaacgtctcacgactcaccgtgggagcgtggtaggattgatgacgataggcctcgggaaggtcaatgccgcgaaatatcggtatacccccgaggccattgttttgcccaggcccctcctcgcatacttgcggggcgtcattggctgccgtcatctcgtctcttcccggtacgtggctgtccatgttcacgggcaggtacggcaatgaggttcccgcacacaaacctctaccaagcatacgctggcaagcccc

SEQ ID NO: 386 - DNA, 1052 bp, Propionibacterium acnes
  source 1..1052: mol_type = genomic DNA
cggggcggccgtagcagtccaagcggcccgccaggcactatctgctgccggggtggacgggtcggtgcaggaggacgggtcgaccatcacggtgaccacgtctcaaagtcggccgacagtgttcctgtcagcgatcggaatcagccaggtaagggggcatgggcaggcccatgctcagcttgtgggaccgggagaacgcccatgacagtgatacgtcgtatcggtgccctggtggcactgcttgtggtgatagccggcttaccggccgggctcgtggccgcaggcgccccgctagtaccctcgggcctgtcatgggcccatgtgcggcatctgttggttaccccagacatgaccgggtctgtgctggtgtggctggtcagcctcatcggctggatcgggtgggcatggttcgccctggccgtcgcagccgaagcggtgacgatgctctcagggcagcggctgcactggcacatgcccggccctcgcctagtgcgccgagtggcagccggtcttctcattgccgcgttcgcggccgcaccggcagccacaagcacggctcacgccgccgaggccacccatgtggcggtcgccgcccaggctggaccggcacacgcggcccccgcccaggacagccccgccaccacctctcaggccccggacgcctccaccactccgaaaatctggaagacctacacggtgcgggccaacgactacctgtggaagatcgccgagcactactacggtgacggcgcccaattccgtcgtatcgccgaagcctccggtatcgacccgcactcagagctgaaagtcggccagaaactggtgctaccggttcccgagaacacggccgcagttcattcggttaaagcgggggagtatctgtgggagatcgccgagcactactacggtgacggtgcccagtaccataaaatcgctgaagcttccggtatcgatgcccattccgatctagccgtgggccaaaaactcgtcatccccgggcccctccgccacgacgccacgccgccacaccactcggcgtcgacccacgcgaa

SEQ ID NO: 387 - DNA, 1057 bp, Propionibacterium acnes
  source 1..1057: mol_type = genomic DNA
cccctaggtcctgatgtgggtcgaggtccttggaatgatggaagttcctacacacccatcgccaaagacctcaacatggacaacgctaccttcaccactccctcatccgtgaagagccagtttatgcacggtgttgaaagaggcgtcggtctacgacgaatgcgggttaatggtcttgcggtgtggggcgctgggcgatggcatcgagaacgcgtgagtgggtggcgatccattcggccgcgtcggggttgatgttgcgggcgacggtgtcgatcgctgttacgtagtgggcaagcctgcgaatctcagcttgttggtcagggtgatcgctgatgagaggctcttgatgggaggcgcggttacggacgtggcggatgagctccacgttttcctcgaagtcgcgtcggctacgccccgggtagtgaggcatacctccgttacgtaagtcagtgagagctttccatacggttgcttccaggcgcggggtgagcagaaagcgccagttgtccagtgacagactcgccacgatctgatcaggggtcgcatcgagcctcgcgcgccgcagtcgcttctcggccctggcgacgttacgcgggaaaccaccgagccgatagctcggggattcccaccaacgccgtatgccagtatcggcgctcaggcgcacgtcaatgaagtttctcaggagtacctcgacatggctgatgtcttccaagaacgctttcgagatgcgggtgttccacacgtaccacgcatcgactggttcgatccggtagcggctgagcctggcgggtgagaaccactcctgcaacgtctcacgactcaccgtgggagcgtggtaggattgatgacgataggcctcgggaaggtcaatgccgcgaaatatcggtatacccccgaggccattgtcttgcccaggcccctcctcgcatacttgcggggcgtcattggctgccgtcatctcgtctcttcccggtacgtggctgtccatgttcacgggcaggtacggcaatgaggttcccgcacacaaacctctaccaagcatacgctggcaagcccc

SEQ ID NO: 388 - DNA, 1057 bp, Propionibacterium acnes; identical to SEQ ID NO: 387
  source 1..1057: mol_type = genomic DNA

SEQ ID NO: 389 - DNA, 1057 bp, Propionibacterium acnes; identical to SEQ ID NO: 387
  source 1..1057: mol_type = genomic DNA

SEQ ID NO: 390 - DNA, 1057 bp, Propionibacterium acnes; identical to SEQ ID NO: 387
  source 1..1057: mol_type = genomic DNA

SEQ ID NO: 391 - DNA, 1055 bp, Propionibacterium acnes; identical to SEQ ID NO: 149
  source 1..1055: mol_type = genomic DNA

SEQ ID NO: 392 - DNA, 1055 bp, Propionibacterium acnes; identical to SEQ ID NO: 149
  source 1..1055: mol_type = genomic DNA

SEQ ID NO: 393 - DNA, 1057 bp, Propionibacterium acnes
  source 1..1057: mol_type = genomic DNA
cccctaggtcctgatgtgggtcgaggtccttggaatgatggaagttcctacacacccatcgccaaagacctcaacatggacaacgctaccttcaccactccctcatctgtgaagagccagtttatgcacggtgttgaaagaggcgtcggtctacgacgaatgcgggttaatggtcttgcggtgtggggcgctgggcgatggcatcgagaacgcgtgagtgggtggcgatccattcggccgcgtcggggttgatgttgcgggcgacggtgtcgatcgctgttacgtagtgggcaagcctgcgaatctcagcttgttggtcagggtgagcgctgatgaggggctcttgatgggaggcgcggttacggacgtggcggatgagctccacgttttcctcgaagtcgcgtcggctacgccccgggtagtgaggcatacctccgttacgtaagtcagtgagagctttccatacggttgcttccaggcgcggggtgagcagaaagcgccagttgtccagtgacagactcgccacgatctgatcaggggtcgcatcgagcctcgcgcgccgcagtcgcttctcggccctgtcgacgttacgcgggaaaccaccgagccgatagctcggggattcccaccaacgccgtatgccagtatcggcgctcaggcgcacgtcaatgaagtttctcaggagtacctcgacatggctgatgtcttccaagaacgctttcgagatgcgggtgttccacacgtaccacgcatcgactggttcgatccggtagcggctgagcctggcgggtgagaaccactcctgcaacgtctcacgactcaccgtgggagcgtggtaggattgatgacgataggcctcgggaaggtcaatgccgcgaaatatcggtatacccccgaggccattgttttgcccaggcccctcctcgcatacttgcggggcgtcattggctgccgtcatctcgtctcttcccggtacgtggctgtccatgttcacgggcaggtacggcaatgaggttcccgcacacaaacctctaccaagcatacgctggcaagcccc

SEQ ID NO: 394 - DNA, 1057 bp, Propionibacterium acnes; identical to SEQ ID NO: 393
  source 1..1057: mol_type = genomic DNA

SEQ ID NO: 395 - DNA, 1057 bp, Propionibacterium acnes; identical to SEQ ID NO: 155
  source 1..1057: mol_type = genomic DNA

SEQ ID NO: 396 - DNA, 1057 bp, Propionibacterium acnes; identical to SEQ ID NO: 393
  source 1..1057: mol_type = genomic DNA

SEQ ID NO: 397 - DNA, 1055 bp, Propionibacterium acnes; identical to SEQ ID NO: 151
  source 1..1055: mol_type = genomic DNA

SEQ ID NO: 398 - DNA, 1003 bp, Propionibacterium acnes
  source 1..1003: mol_type = genomic DNA
ccagtcctggatcgggtgccggccgaagtcgcgtacgatagccgagtaaccaagttcgccccagcagaactggcgcatcccctctatgtcgcgccagacgtagaagggcgcgtaggagttctggggtgcgcctttgaccttttcttggatgaggtaggccttgaactccagtccatggtagccgtccatgaggtgtccagtctggatgacgcggtcgcggatgatctgcatgtcatagtcggtgggcagggtgatctgatattgcatggcgtacatcagcggttctccttggtttcgtgggagtaggtcgtgggggtgacgggttcctgccaatcgatggttgacaagtcgttggcggcttgttggtaggtaaggtggatcattggctgtttgagtgcagcgccatgccagtgtctctggccggcgtcgatccagatggattcgcccttggtcaggtgctggggtgcttgtccttcaatatggaccagggcaacgccgcccgtgacgtagaggccctgtcccttggggtgtgtgcctcagcggcaaacgtgacggcgtgggcggcacgcccggcgtcttccgtggcacgatcggccggatccatggcggcgcgcagctgctgttctgcagccaggcgtccaggtcacggcgggcagcatcgacacccagggcagcctcgacggcttcagggctacgacgctggccgggctggttgaccgcagaccactggtgccgggcgtcgtccagatcatggccggcggcgtcgatgagggcggtggtggcttcggcgcagcatcgcctgatccactccgaacgtgacaggccagctgtctcggcggcactgtcaatgcgcgccaggagagatttcatgggcgctcatctgtagcctccagataggcgttgatgtagcgcagagcctgatccgtcatgtcgatggcggctgcctcggcagacgacacaacgggctgtggatgataagaccacccaacatagacggcgaaca

SEQ ID NO: 399 - DNA, 1017 bp, Propionibacterium acnes
  source 1..1017: mol_type = genomic DNA
ctgggacccggtttgggctccggagtcttaggctccggcttcacatgcctaggcacttcggctgcggtgggaggagtcagcacgtggcgtaccggcttggtgaccttctgggcacccgaaacaaccggcttagacaccaccttggcacctttgaccaccggtgcggctgccttcgcgccggccttcttgactgcacgatgcgctttgatagccccggcctcggcccggccaaccctactagcagtagcatcgagggctctgtggcccgtcgttgccctcaccggtgcatccttgccctggcgggtctgcttcgcgatcgccgacatgccgcctcgcaatgccgaaacatgattgtgggcgtgggcgatcgccgacatgccggccgtcgcgatttttgactggccctgcggggcccctgccccagcacgaatctgccggtaagccgccgacgtgccacgagcacccgccgccattcgcgccaccttcgcagccctagtcactcccgtcgacacgccacccgtggctaccgcagcagcacccgagaccacagtcgaggccatccgccttcgacccgatccggtgagcttgcgaccaccactgcgcaccatccggcgagcaccccgcccagcccactggccgatcaccgagcccctttcggaacgcttgctgcgcatccaatcgttgatcttgtccctcagccccttctcgcccttgtgacgacgccacatggacatcaagaacccgataatccccacgagctcgagcatgttgacaaccatgaccttgatggcgacatcaccgtcagaggcgaaaaccgacttgatgatgagcatgaccacacccaacatcaccatcgacccgacaatgccgatcatcgagtacaagatcgaacacagatcccggatgagcggatctgtgcggccagggatagcccgcaacacgttgagcatcgacataaacgccgaccacaccaacttgcacacgtagaaccagcacatgcccgcgaacaccagcagg

SEQ ID NO: 400 - DNA, 1108 bp, Propionibacterium acnes
  source 1..1108: mol_type = genomic DNA
ccccaatgcccccacaacgatcagcacaccaacagcgatcatcaggtgggcagcactaactgatcccaacgaaccaagatcaaacaagccctgcccgggagcgtcgagcagtccgtgggcgcgaagccatgctccgagattgccaatgatcttggggaccatcttgttcagtagggctatccctccgatgccgacaacgaggaagacgaggatttcttcgcctgcgttgtttcttcctgtgtttgcggtcatgctgccttctcggggtggatggccagccagctgatgaggttgtcggtgatctgccctgagatttggatcagttcgacttgcccggcctgccatgcccgcgatgtgccggcaagcaatgatgctgggacccctactgcgcggccacgggatgcaacctcagccaaggcggcgcgtaactcctcgacggtgctttcgatgtaccaactgccgtcagtactagtctcagcggcatcggtggtagcgataagagcatcggtgaggtcgtcgacggcgcggtccagatcagcgatgtccggtagggctacagcagtcatggtgtgtcttccttctagggtgccttcactggtgaagggtccctagccccggccgatgtgcggtgctgtgggaaaaatgcttcccattggtccgtcttagttaggaaacttggcctaagtgctgtcgagagtcgcgtgttcgtgaccggttcgaagacactgccgctttgccttcttgcccgtggcgcttccgagatgggttcagtgggcgatggctaggccgatgagggcgccgctgcacaggctgggtgcccaggggaggaatcgggtggtgtggtgtcggaaccggtcgatgagggcatatagggcgatcagggtgaggccggctatgaccgtggcgtggatcgtgtcgatgccggttgctgcggccggggctgcccacagtggtgtgatgcgcacgtcggagaagccgaagccgcctcgggagatgagccaggcgatcatccacgctgcgaagatgatggtggtagcgatgacagcacgtgttgccgcagtctggtccgagagggcggtaacggctacagccccgatccatccggccc

SEQ ID NO: 401 - DNA, 1004 bp, Propionibacterium acnes
  source 1..1004: mol_type = genomic DNA
tgggttcagatttcgaatgtgggaggggtttgtggatgggtatcggtgtcctcggcgagggcttggtcgagcaggcaggtggccggggtgtcggtagtctcgtccagctcgtcgatcatctcgtcgaggaagttgggggtggtggatgcggcccacacaggtgggatagccggtgcgggtcgaggcggtgtggggaggcggagtttggtttggccccagaggggtgtgtgggtcatgccggcgggagtggtggcggcgtgagtggtcacacgccaccagcccgccagccatgccagaggtgaccaggtccagtcgatgcgaccaacaacgaactgggcgagccatccggcagccagcgcgaaaatgaaaccgcggatggtcatgcccccgtcgataattttgaagcccatcatcgcggcaggaactacgccgccgacagcgagcacctgatagatcgtgtagggcccgccaggaatccttcgacctgaggaatccttaccgataatgcggggctgctggcgggcctcggtgtgccactgaatatccacgatcagctcttgcccaatccttgcatcatctgtccgaagaattggatcgcgttaccttcgataagccagtgcgccataccacacacaaacagcatggagacgatcttggccaggctcataccgtgtttgaagatgttgaacgcggcaatgcccacgactacgaccatggcgacggctcgcaccgcggactgaccttcacctgccttgatcgtcgtccattcgaagaggttctgcgattccagtggcagcaggaggaattgatcgagcatgagaggttttcctttcaggaagccgaccgggatggtcccggtactgacgggctggacggcacgggtgtgccggccaggggcagaaggcgtgacggctggtcgagggaggcaacctcccagcggcctgcacggctgacaagagtcaggccgtactggctggtccgggtagtggattcgtcgccggtgg

SEQ ID NO: 402 - DNA, 988 bp, Propionibacterium acnes
  source 1..988: mol_type = genomic DNA
cgttgccctcaccggtgcatccttgccctggcgggtctgcttagcgatcgccgacatgccgcctcgcaatgccgaaacatgattgtgggcgtgggcgatcgccgacatgccggccgtcgcgatttttgactggccctgcggggcccctgccccagcacgaatctgctggtaagccgccgacgtgccacgagcacccgccgccattcgcgccaccttcgcagccctagtcactcccgtcgacacgccacccgtggctaccgcagcagcacccgagaccacagtcgaggccatccgccttcgacccaatccggtgagcttgcgaccaccgctgcgcaccatccggcgagcaccccgcccagcccactggccgatcaccgagcccctttcggaacgcttgctgcgcatccaatcgttgatcttgtccctcagccccttctcgcccttgtgacgacgccacatggacatcaagaacccgataatccccacgagctcgagcatgttgacaaccatgaccttgatggcgacatcaccgtcagaggcgaaaaccgacttgatgatgagcatgaccacacccaacatcaccatcgacccgacaatgccgatcatcgagtacaagatcgaacacagatcccggatgagcggatctgtgcggccagggatagcccgcaacacgttgagcatcgacatgaacgccgaccacaccaacttgcacacgtagaaccagcacatgcccgcgaacaccagcaggaccacagccaaacccgccaccgtcgacgagtaaaagaagaaccccaccaaccacgaaccatccgcaatatcgccggcgtaatccgacaacccctcatcacagtcaccaaggtcgtcgcgagcatccgagacgtcatcgtaagggccacccttgagcacctcgatgtacttgtcgtggcacttcgcatcaataatgcggccatagttgagctgctgatgaaccggcgccacgaacgagtcc

SEQ ID NO: 403 - DNA, 1053 bp, Propionibacterium acnes
  source 1..1053: mol_type = genomic DNA
cgattttgtccacccacccctgtcgattttgtccgccaagtattagacaaaccattagacagtgaattagaccctgggtcgcgtcagcgtgttagctcaccaacgcgcgcgcgcgcggcggccgagccgccgaagccaaagaaacccataccaccaacgcctgaaccagcagcccccgcttcagacagtcctgtgtcagcgcacgctgatgaggctgccgagttggcgtggcggttcgtggggtggtgtcctcagctggtaggggcaccgaagaaggtgcgtggccagctccgtcagctggtcgctgccgagatccgccggaatccgggctggctggatgcgccagcgttggaggttgttgcccagcgggtacgtgctgaaggtgcgctgggggtccagcactgcgagattgtgcgagccgagctgcacggggtgatcgccgaccagaaggccgcccccgcccgccccgacgccctgcacgcgcgggagcccaagtggtgggacgacgtgtactacgaaggaaacacaaccgtgtggtacgactctgacgaaaccagtgacgacgacgaggcgtggaaccggtcgcaggtatgtcatgttgctgagcgtgacgacatggctggcgggattgctaccaacctgctggcctcccacgctgatgatccgatggcctggctgactcgccgtcaaaccatgctgatggctcgtttcccccacgcccagaacgaggtcatcgcgatgtgccacatcgtgcgcaccgccctggaggccgacatggccgccggaacccggtgggaggactgatgagggtctcccggcgcgccctcatggccgtggcccgtgccgacgctgccgcagcagaccatgccaccggccgatgggtggccacagccaacgccaccgtcgcccggctgaccggactgtgcgaacgcaccgtccaatacgcccgcgccaccctggtccacctgggcctgtgccgcgtcgtggccaccggccgctacctcaccgccgacgagcggcgcacggctgctcgcacccatggcggccgccaga

SEQ ID NO: 404 - DNA, 1009 bp, Propionibacterium acnes
  source 1..1009: mol_type = genomic DNA
gcgagccacgaccatcgccaagctgaatggagagcgagcatgagcaccacccctgccgggttcgacttcgacgctctggccgagtgggccgagagcgatgaggcgacccacaccccgcaaaccagccccgtgttccggggcaaggacgccgcgcgcgccagccgcgcattcctcggccgaggacggcccaccctcggcgcggaccacgccaccggcgagggccggtcgccccgccgtcaggtacggctcgacgcacgcaccaacgcgcgactcgacgcctacgcagccgcaaccggcaccagcgcctcccagatcatccgcgacgccctcgctgactacctgcccgcctgatcccaccccaatccactcgggcgcctgtcagtgccccctcttctgggtggtggtccggggcgtcaccgccccggaccagttgggtagtcatctcagttgaaataagcgattagtgatacgcccctcctgctttccggtgctgtcatgagcgtctgacaacagcgacacctcggggcagccgacggacagtcctctggctgccgctctgatcccatgcccacggcacgaaggtgtcggacagctcggtctcatcatgtgcccaaatagcgtcgtgggcctgtcgccaagcttctcgggagccccacacgggcacgaccgggccacaccggtgtcctggtctccagtgtcgcgacactgtcgatttcggtacgtgcaatgcggcggcggtttgacggatcgacatcccagactcccgcgcgtcccagatcgccatgtggagagtatttgcctccagtgcggccgccacacttgcacgctctcgcgcacgctcgaatgcccgcctagtgctctcaaatgtcgtcacgacgcctccccctgaaaatactcagggtgtcccacggtgggacaccctgagtatttcataccccaactcgcctcaccacacgtcgacctcgacaccgatcaagcgacccgtatcggcgacattgccgtactgctg

SEQ ID NO: 405 - DNA, 1029 bp, Propionibacterium acnes
  source 1..1029: mol_type = genomic DNA
caggtgggtttgaccgccagcgtcggattggtgctggtcgctgggctgatcaccactctcaaccgtcgttaccggacccggttcacccgtcagccccgcggcaaggccatgaccctgcccagcccggacgcccaaactgccgagatagcgctgcgcagcaccggggcgactgacactctgacgatcacctgcctcgaccaggcgctccgcgcgatcggcgcatggtgccaccactgcgggcacccgctgccacccctgctggccgcccgcgtcgatgacgaccggatcgacctgctgctatcccaggcggcccccgaccatcccgaggcggtggagctggccgccgacggatcggtgtggaccctcaccgccgaccggatcgacgacctgctagcccacaccgatgacaaccaagcggctccgtggccgtctctggtcacactgggacgcgacgacgacggcgcccacatcctcatcgacttggaagccgcaggaaccttgcacctgatcgccgatgacgaccaggtcgacgcggccctcgccgcgatcgccgtggaactggccacctgcgactggtccgacgaagtcaacgtcaccctcgtcggccaggtgtgcccgggcctagaagacgcactagagtctccgaccctgacccgcgccaccgacgtggacaccctcctcaccaccctagaagctcgcgccgacgaccagcgacacatcctcaccgaaggaaaccccctcgccgctcaccgagccgaccccgccatctccgacgggttcgacgccgaagtgatcctcctcgacaccaaactcaccgaagaccaccgcaaccgcctcgccagcctcgtcgaggctcttccccgcgtgtcagtcgccgcggtaacaaccagccccaccagcccagacgaatggtccctcaccctgacaggtgacccactagccgccgacctggctcccctcggctggcacatccacccccaaaccctctcccccgacctgtacaaccgcgtggttgaactgctcgccaac

SEQ ID NO: 406 - DNA, 1024 bp, Propionibacterium acnes
  source 1..1024: mol_type = genomic DNA
ccagcaggaccacagccaaacccgccaccgtcgacgagtaaaagaagaaccccaccaaccacgaaccatccgcaatatcgccggcgtaatccgacaacccctcatcacagtcaccaaggtcgtcgcgagcatccgagacgtcatcgtaagggccacccttgagcacctcgatgtacttgtcgtggcacttcgcatcaataatccggccatagttgagctgctgatgaaccggcgccacgaacgagtccacaatgatcgccgacagcttcggatccttcgagtctcccgtcgaggtcatgtcatcaggaatctcgacctcaccagcggtcgccgtcgcaggatcaaccgaactagtaatcatccgagacagcgccacaccgaactgctgggtgcgagccaacggagtagccaacgtcgtcgtatcgcctgcgaacttcgccaccggggccgccaagaaacccaacgccagcgccgcagcaatcgccgcacgcgcacccgtagcccacgccccagccgtacgtcccctcatcatcttgacgaccacgcccacaccggcgcacgtcgtcagcaacgccaacaccgttccaccccagctgtccgctcccagcggggccaaaaccttgtcgtggatgtcgttctgcaaccccaccagcggtccggtaatccacccgacccagctcatcgccacggtccagtccaacaaccggcacaacagggcaacgaccatcaggtacgtgttccaacacatgccaataatggaggcccacatagccttcagcggggccgtaacgccaccatcgtccatcgacatctggtactgaaacaagtgaataccgttggagtcagtcacattgaaaccgtcacccatccagcccagcccaggacccgacgccatggcaggcacactgctcagcgccaccaccagaaccagcgtggtgacgatgatacggaaccgccgctccccggccccggggcggcgtggatgacggctcacgctgtctcccggtcgtgctcgggcgggttg

SEQ ID NO: 407 - DNA, 985 bp, Propionibacterium acnes
  source 1..985: mol_type = genomic DNA
tccctgcgaccagtgaaccgtgcccccactgcgcccacaatgatcagcacacccacggcgatcatcaggtgggcagcactaactgatcccaacgaaccaagatcaaacaagccctgcccgggagcgtcgagcagtccgtgggcgcgaagccatgctccgagattgccaatgatcttggggatcatcttgttcagtagggctatccctccgatgccgacaacgaggaagacgaggatttcttcgcctgcgttgtttcttcctgtgtttgcggtcatgctgccttctcggggtggatggccagccagctgatgaggttgtcggtgatctgccctgagatttggatcagttcgacttgcccggcctgccatgcccgcgatgtgccggccagcaatgatgctgggacccctactgcgcggccacgggatgcaacctcagccaaggcggcgcgtaactcctcgacggtgctttcgatgtaccaactgccgtcagtactagtctcagcggcatcggtggtagcgataagagcatcggtgaggtcgtcgacggcgcggtccagatcagcgatgtccggtagggctacaggagtcatggtgtgtcttccttctagggtgccttcactggtgaagggtccctagccccggccgatgtgcggtgctgtgggaaaaatgcttcccattggtccgtcttagttaggaaacttggcctaagtgctgtcgagggtcgcgtgttcgtgaccggttcgaagacactgccgccttgtcttcttgcccgtggcgcttccgagatggtcagtgggcgatggctaggccgatgagggcgccgctgcacaggctgggcgcccagggaaggaatcgggtggtgtggtgtcggaaccggtcgattagggcatatagggcgatcagggtgaggccggctatgaccgtggcgtggatcgtgtcgatgccggttgctgcgaccggggctgcccacagtggtgtgatgcgca

SEQ ID NO: 408 - DNA, 967 bp, Propionibacterium acnes
  source 1..967: mol_type = genomic DNA
ggtgggcgctggaccaggtttgcggggcatgcgcgcatcggtgatcttggccgccaccaggtgttccagattgtccaagtgcccggagtcagaggtcagcagaagagtagtcacctcgaccgcggtggctgaggcgatctgagctgtgcggcggtcgtgatgggtggtgtcagtgctgacagctgtggtgggagcggatgccggggccgccgaacggaccagggcaacggggccgcatgcgactccgcacagcacgagggcaaggaagcctttggtggccatcgatccggtgtggggccagggacccacgttttcctgtgcctgttttttcttggccgaccaacggcgggacttagggttagcggatgcaccttctggggtgcatgctcgtctcaatcgcatcggtcacctccttcactggatgaagggaccaaggaggtgaccgatgtgcggtcgaacccgaaaaagttcaaacttttttctgggtctgcctcaagtacgacagaaggcctgcatcatcacggcgttgtggtagcagatcttgcgtcagcgcaaatgtatgggcctcgtaggagtagctcttaggtgggtcccggtggttgcggccagggcgagggtgtcgggtatgtgtagcgctagtcccgggttcgtggtgtgagggcttttgggtgctgacatgcactacccattgctagacgctgtgctgtggcatggctggacgtctagcagacgggttgacatcacctttaggctggcagcgcccgaggccgcaggccagaggaagcggacagcctaacgattgacgtccccctctcctttccccaacctcctggagtcgatgacccggagatagatcgatgtctatgcatcggtgcatcgatatacctatgtatctgtctgtggtttttagaggccactcccgtcgccccgggccgctcagcgataccgcaaggctgtgtgggatcag

SEQ ID NO: 409 - DNA, 1055 bp, Propionibacterium acnes; identical to SEQ ID NO: 159
  source 1..1055: mol_type = genomic DNA

SEQ ID NO: 410 - DNA, 997 bp, Propionibacterium acnes
  source 1..997: mol_type = genomic DNA
cgctcctgccagctcctcggtggtctcaaagtcaggagacgagacagtgacggtgataagagcctggatctcgacctcacgctcatcggcggccagctcggcgttgtagtcgacgagcacctgagcggaatgctcgatagacatgagggtcgaagcctgggtcatctcaccgccctcgacgttgtcgagctggtcgacggtttggcggatggcccgctgatttttctgcatcgcagcgtgacgggtccgggccactccccggatcgccacgtcgaccggcacgccagtgtcgtcgatacggcccaggaactcgtaggcaggccacgtcatcgtgcggggcaccttgcccagcgcaatgtgggactggtagacggtctcgccggtgtcggcaccgattttgaggacgcgacgattccacgcctgagccgtccgggacatgtgggagactcgcttgtcatcctcgctggccagcaggtcggaggtcgcggcctcatcgatgaccaactcccccagcgcggcacgtccaacctcatccatgagggcgattccctcgccaggggcatcatcacgcaaccgggtcgggtggcctgacaggtgctgccgaagccagatctgttcatcaacggtgaccgggcggggttggaacgctgccggcagtttcgcaccgaattccttagcctgacggagggcccactcccgtgcgacacggccaggagcggtggtcatgagtccggcggcttcggtgattttgttgagggcggcggtccaggcggtgtgggtgcgtattttctggtcttggttgagtttgatcgataggaaccacacgcgccggcctagggattcggtttcaggctggtcgagggtggcgtcgatttcgtcggcccacacggggtgttcgctcaggtcgaggccggcggccatggcgtcgacgatttctgcggggtcggtccaggtgagggctccgttgaggcagaactcgtggcgggcgaggtggcgg

SEQ ID NO: 411 - DNA, 1162 bp, Propionibacterium acnes
  source 1..1162: mol_type = genomic DNA
cccatcgtttacatcctcgactggtccctgcgaccagtgaaccgtgcccccactgcgcccacaatgatcagcacacccacggcgatcatcaggtgggcagcactaactgatcccaacggaccaagatcaaacaagccctgcccgggagcgtcgagcagtccgtgggcgcgaagccatgctccgagatgaccgatgattttaggggccatcttcttcagcagggctatccctccgataccaacaacgatgaaggcgaggatttcttcgcatccgttgtttccttctccggtggggccgttcatgctgccttctcggggtggacggccagccagccgatgaggttgtcggcgatctgccctgagatttggatcagttcgacttgcccggcctgccatgcccgcgatgcgccggccagcaatgatgctgggacccctactgcgcggccacgggatgcaacctcagccaaggcggcgcgtaactcctcgacggtgctttcgatgtaccaactgccgtcagtactagtctcagcggcatcggtggtagcgataagagcatcggtgaggtcgtcgacggcgcggtccagatcagcgatgtccggtagggctacagcagtcatggtgtgtcttccttctagggtgccttcactggtgaagggtccctagccccggccgatgtgcggtgctgtgggaaaaatgcttcccattggtccgtcttagttaggaaacttggcctaagtgctgtcgagggtcgcgtgttcgtgaccggttcgaagacactgccgctttgccttcttgtcagtggcgtttccgagatggggtcagtgggcgatggctaggccgatgagggcgccgctgcacaggctgggtgcccaggggaggaatcgggtggtgtggtgtcggaaccggtcgattagggcatatagggcgatcagggtgaggccggctatgaccgtggcgtggatcgtgtcgatgccggttgctgcgaccggggctgcccacagtggtgtgatgcgcacgtcggagaagccgaagccgcctcgggagatgagccaggcgatcatccacgctgcgaagatgatggtggtagcgatgacagcacgtgttgccgcagtctggtccgagagggcggtaacggctacagccccgatccatccggcccatcc

SEQ ID NO: 412 - DNA, 933 bp, Propionibacterium acnes
  source 1..933: mol_type = genomic DNA
ccccgactaccagacccgccgtcgtgaacgcagggaaaccctgcgagccacactcagggccgcccagcagcatgtcaggacacactgatacccgctcatacacacaccatgaaacacgacaagccacctgacagtatcagctgcaagacgcatgacaacatagaaggacatgatgaaatacacatagacacaaccccgcacagcagtttcgcaacaaatcatgatagtctcatggcagtatcgcttgatacacacatagcatcactcccacataggcagttatgctgatatactcctactaggttatccgtccaacatgctgagtgggttcctgtacagcatgaaaggagcatggcatgatatgggccgttctcaactgcaagggtggtgtcggcaagacgaccagtgccctcctgctggcggcagccgccgccaagcagggccacaccaccctggtggccgacgctgacccccagggcaccgcatcccagtggtcagccctggcaaccaaaaacgacgaacccctgcccttcccggtgcaagcggtcaacatcgccaccatggaggcactgcccaccaccaccgacgcccatgatctcatcctcgttgacacacccccctcggcaggcgatctgatgttccaggcatgccgcatcgccgacctcatcatcatccccaccgccacctccggacccgacatctcccgaacatgggtcaccatggacgccacacaaggcacaccacgcgcgatcctcctcacccaaaccgaacacaaccgtgtcgtctaccgccaagctcgcactgccctcgccgccgacgacaccgtcgttctcctggaccacgacatcccccgccgtgaatccatccgcacagcatggggcaccaaccccccagacgacgtcatcacctactacctgcccgtcctcaacgaac

SEQ ID NO: 413 - DNA, 928 bp, Propionibacterium acnes
  source 1..928: mol_type = genomic DNA
gacgacgacgaggcgtggaaccggtcgcaggtatgtcatgttgctgagcgtgacgacatggctggcgggattgctaccaacctgctggcctcccacgctgatgatccgatggcctggctgactcgccgtcaaaccatgctgatggctcgtttcccccacgcccagaacgaggtcatcgcgatgtgccacatcgtgcgcaccgccctggaggccgacatggccgccggaacccggtgggaggactgatgagggtctcccggcgcgccctcatggccgtggcccgtgccgacgctgccgcagcagaccatgccaccggccgatgggtggccacagccaacgccaccgtcgcccggctgaccggactgtgcgaacgcaccgtccaatacgcccgcgccaccctggtccacctgggcctgtgccgcgtcgtggccaccggccgctacctcaccgccgacgagcggcgcacggctgctcgcacccatggcggccgccagatgcgcgccgcctccacccgcgtcctcaccatgtcctgcgcaatcgtttgcgccctaccccgaaggggtcaccactacaggaaagttaagttcctagatggtcaccaacgcacgcgcaggcgcgtgcgaaggccagcaacaccagagaagaaacccctgtggctgcaaaaactcgcagccctcctcgaccagcacctgccctggctggtgagaaaccatcacatcggccgactgtgccacgccctcaccgccctgggcatcgacgaacactggcaacccgcagacctcgacgccctcctcgacgccatgaaccgcaggaaccgtcgcctcggcctcgacgtgccatgcgccgacgaccagcacaaccccttgggactgttcatccatcaggcccgagacaccctcacccacgacaacccccatgaacgccgcct

SEQ ID NO: 414 - DNA, 957 bp, Propionibacterium acnes
  source 1..957: mol_type = genomic DNA
ggcagggtcgtcgggttcttcggttacctcgggtggggtcgatctggctgtctcggtgtcgtcggccaggtcggctcccaggatgcgttcccattcggggctggttttcttgcccgctgaggccatcgtctcgtcgatctgttcgtcagtgggccacacaaatttctttttggtccaggtcgtggtgtcgggtcgcagctgatccagcagttccaggtcttgcggggagtgggccttgcgggggtcgggggtgtagaagaattggacttccttgggggctgattcgccggataggtaggtgcctcggccgcgtttgccgaacgggatgcccacgccgacgtgttcggagccgaacatcatgcgggctccgtcagcggacaggggtccggtggcggcacgcccggagaagttgtctcggatttcgccgcccaggaactcggcgtcggggcgttgggtccccagatcgacgtggatacggcaggcggctgccatgcgcagcagggagccgatccagccgaaaacggggcattctccgggcatcccagagaccttgatcgttgaccaccagtttttcgcgttgccgtagaactggcggtactcgtcgatgaggaccagcacgcgggtgaagtcggtctcgcgggccccttcttcttcgatgcggcggtagcggtcctccatgagagaccacagccagtggatgagggcgacctggtcggggacggtagtggcgaccatctcgatgttgggccactcccgcaggcccaggtactcgatgcgtttagggtcgatgacgaagacgcgccagttgcggcgggcaccctcgacggcgtcgccgatcatggacaccgtttttccggtacgggtgcggccggccttgagctggtgggccatgacaccggagatgtcccagaaacaggtgttgccgtcctcgtcgacggcctgggggattttctccca

SEQ ID NO: 415 - DNA, 947 bp, Propionibacterium acnes
  source 1..947: mol_type = genomic DNA
ggctccggagtcttaggctccggcttcacatgcctaggcacttcggctgcggtgggaggagtcagcacgtggcgtaccggcttggtgaccttctgggcacccgaaacaaccggcttagacaccaccttggcacctttgaccaccggtgcggctgccttagcgccggccttcttgactgcacgatgcgctttgatagccccggcctcggcccggccaaccctactagcagtagcatcgagggctctgtggcccgtcgttgccctcaccggtgcatccttgccctggcgggtctgcttagcgatcgccgacataccgccccgcaatgccgaaacatgattgtgggcgtgggcgatcgccgacatgccggccgtcgcgatttttgactggccctgcggggcccctgccccagcacgaatctgccggtaagccgccgacgtgccacgagcacccgccgccattcgcgccaccttcgcagccctagtcactcccgtcgacacgccacccgtggctaccgcagcagcacccgagaccacagtcgaggccatccgccttcgacccaatccggtgagcttgcgaccaccactgcgcaccatccggcgagcaccccgcccagcccactggccgatcaccgagcccctttcggaacgcttgctgcgcatccaatcgttgatcttgtccctcagccccttctcgcccttgtgacgacgccacatggacatcaagaacccgataatccccacgagctcgagcatgttgacaaccatgaccttgatggcgacatcaccgtcagaggcgaaaaccgacttgatgatgagcatgaccacacccaacatcaccatcgacccgacaatgccgatcatcgagtacaagatcgaacacagatcccggatgagcggatctgtgcggccagggatagcccgcaacacgttgagcatcgacatgaacgc

SEQ ID NO: 416 - DNA, 926 bp, Propionibacterium acnes
  source 1..926: mol_type = genomic DNA
ccctgcgagccacactcagggccgcccagcagcatgtcaggacacactgatacccgctcatacacacaccatgaaacacgacaagccacctgacagtatcagctgcaagacgcatgacaacatagaaggatatgatgaaatacacatagacacaacccagcacagcagtttcgcaacaaatcatgatagtctcatggcagtatcgcttgatacacacatagcatcactcccacataggcagttatgctgatatactcctactaggttatccgtccaacatgctgagtgggttcctgtacagcatgaaaggagcatggcatgatatgggccgttctcaactgcaagggtggtgtcggcaagacgaccagtgccctcctgctggcggcagccgccgccaagcagggccacaccaccctggtggccgacgctgacccccagggcaccgcatcccagtggtcagccctggcaaccaaaaacgacgaacccctgcccttcccggtgcaagcggtcaacatcgccaccatggaggcactgcccaccaccaccgacgcccatgatctcatcctcgttgacacacccccctcggcaggcgatctgatgttccaggcatgccgcatcgccgacctcatcatcatccccaccgccacctccggacccgacatctcccgaacatgggtcaccatggacgccacacaaggcacaccacgcgcgatcctcctcacccaaaccgaacacaaccgtgtcgtctaccgccaagctcgcactgccctcgccgccgacgacaccgtcgttctcctggaccacgacatcccccgccgtgaatccatccgcacagcatggggcaccaaccccccagacgacgtcatcacctactacctgcccgtcctcaacgaactcatggaggccctgtcatgaccaccaagaaa

SEQ ID NO: 417 - DNA, 930 bp, Propionibacterium acnes
  source 1..930: mol_type = genomic DNA
ccggtttcggctgttgcttcggtcttcatggtagctgatagcccgcgtcgttggaagtgcgacgacgccgatcctcatcggtatcgcaccctgttccagggtcgagaatgtgaaggattaacaaccatgacaagtcatgagacgccctccctgagggcgtcatgaccgctttaattcaagctctgccgacagctgaactgtctgctggacctggtgctagcagtccagctagaccctctgctgagggcttcatcaagattcatcacgaccttattagtgcgggcgtgtcgggtaacgcgatggcgttgttcgtcgcgttacgtaaccagcccggctgtgatcagtggacccgtcactcgtacctgcggctagcccaatggtgcggctgggatgggctgtcggaggcggcgggctgtaagcgggtgcagcgggccgctgctgagctcgctagcggtggttggctggaatcgcgggtcggccatgatcgtcgcaccgctaagacgctggtgtggcatcggttgaccagccccgacaccgaccgctgggagcaattgccgcggattgtgtgggcgaggatctgccagatcgccggggagacgtcgggagagtgggtgaggcattggctggtgtggcggatgctggccggtcgtactggtgtggctcaggcccctatgtccatcgtggctcggttcctgggctgttcttcgcgccaggtctctcatatccgtggggctctcgttgatgccggtctgctcggctgtgacgaggtctcgggggcggcgagccgggtgtggttcccctcgatggccgaggagtgtgcagcggatcgtgaggtggttgatggggccgtcgtcgatgctggggtgggctctggtgaaggtgtcgaggagggcggggaacccctgtcgattttgtccacccacccctgtc

SEQ ID NO: 418 - DNA, 909 bp, Propionibacterium acnes
  source 1..909: mol_type = genomic DNA
aaccaggaacgaggacgataggccgatgctggtcaggtcgcgatgttgaagtcatggagacatatttgcacagtgcgcggacaagggagtggcactatttctggcatgaatttagatctgggtgtccggtgaggcgatcagaacgcctccatgtactgtccgagtgtctacgatgcagcggacacagtcgagcagctggctcacaagtttccaggtgtccttctgcccctatgagggaagtcggctgctctcgcaacctttgagggctgctctggggtcggaaccagttacagatcgttcaagttccgggaactaccgccggtcacgctgattgattcccgggcgatctcgcttctgacgacagtggtcggtgaccgagaggcgtcctactctgaccccgctgctgcggtgagtaaatcacgggcgtcccggatccggccacccgtccaagtgccagccagcttgatcggctaggcatcgtcaaggagcgacgatgaggtgatgatgcgatgtgagcgcaccgcgaagtgaggtataaagaagccttcccgggcgcatgcgtcgcccaggaaggccaggttggcccctggacggctgaatggttgggcggatcaggctgtagcggagacgtgcagtacctcgtaggcgatggcgttggttgggctctggtctgcatcgtggctactgagttcgacgaggatgacggtccaggtggtgatgtcgacggcggtgacgcgggcgatggtggaatcagtggatgctgcaaggaagtcggcggttatgtcttcgatgcagtgggacggagcagtgctggtgggcaggggcacggtcttgacggtcaggcttcgggcagcagagtaatcggcggttccgttaacaagctggtggacggtccagtcctggatcggg

SEQ ID NO: 419 - DNA, 939 bp, Propionibacterium acnes
  source 1..939: mol_type = genomic DNA
gtgacgacatggctggcgggattgctaccaacctgctggcctcccacgctgatgatccgatggcctggctgactcgccgtcaaaccatgctgatggctcgtttcccccacgcccagaacgaggtcatcgcgatgtgccacatcgtgcgcaccgccctggaggccgacatggccgccggaacccggtgggaggactgatgagggtctcccggcgcgccctcatggccgtggcccgtgccgacgctgccgcagcagaccatgccaccggccgatgggtggtcacagccaacgccaccgtcgcccggctgaccggactgtgcgaacgcaccgtccaatacgcccgcgccaccctggtccacctgggcctgtgccgcgtcgtggccaccggccgctacctcaccgccgacgagcggcgcacggctgctcgcacccatggcggccgccagatgcgcgccgcctccacccgcgtcctcaccatgtcctgcgcaatcgtttgcgccctaccccgaaggggtcaccactacaggaaagttaagttcctagatggtcaccaacgcacgcgcaggcgcgtgcgaaggccagcaacaccagagaagaaacccctgtggctgcaaaaactcgcagccctcctcgaccagcacctgccctggctggtgagaaaccatcacatcggccgactgtgccacgccctcaccgccctgggcatcgacgaacactggcaacccgcagacctcgacgccctcctcgacgccatgaaccgcaggaaccgtcgcctcggcctcgacgtgccatgcgccgacgaccagcacaaccccttgggactgttcatccaccaggcccgagacaccctcacccacgacaacccccatgaacgccgcctggcccgcgaacaccaccgcgcccaactcatcgacgaccaactccgccgccgcgcagaaac

SEQ ID NO: 420 - DNA, 967 bp, Propionibacterium acnes
  source 1..967: mol_type = genomic DNA
gacgccggccaccccaactactccgacccacacggtgaccccagctccggcctctgccggccactcgaccagcgacgagcacccaatccatacggataccgccacagcggacaaggccagcaacgaggacgccctgtccccaatccaggtgggcttgaccgccagcgtcggactggtgctggtcgccggactgatcaccaccctcaaccgccgctaccggacccggttcacccgccagccccgcggcaaggccatgaccctgcccagcccggacgcccaaactgccgagatagcgctgcgcagcaccagagcagccgagactctgacgatcacctgcctcgaccaggcgctccgcgcgatcggcgcatggtgccaccactgcgggcacccgctgccacccctgctggccgcccgcgtcgacgacgaccggatcgacctgctgctatcccaggcggcccccgaccatcccgaggcggtggagctggccgccgacggatcggtgtggaccctcaccgccgaccggatcgacgacctgctagcccacaccgatgacaaccaagcggctccgtggccagctctagtcacactgggacgcgacgacgacggcgcccacatcctcatcgacttggaagccgccggaaccttgcacctgatcgccgacgacgaccaggtcgacgcagccctcgccgcgatcgccgtggaactggccacctgcgactggtccgacgaagtcaacgtcaccctcgtcggccaggtgtgcccgggcctagaagacgcactagagtctccgaccctgacccgcgccaccgacgtggacgccctcctcaccaccctggaagctcgcgccgacgaccagcgacacatcctcaccgaaggaagccccctcgccgctcaccgagccgaccccgccatctccgacgggttcgacgccgaagtgatcctcctcgacaccgaactcaccgaagac

SEQ ID NO: 421 - DNA, 882 bp, Propionibacterium acnes
  source 1..882: mol_type = genomic DNA
ctctacggggccatcatcgccgcctccaccctggacccccacctcagcatcgacgccctagcccgcctctaccagctccccctcgacctcgtgacccaagccctcaccgtctaagcgtcgatgagcgggggagaggtagcgcactatcggctaaggaaccccacaaacaccaaacccttgtcactgggaagggtttggtgttatgctggtctcacaactcaacagaggaggtgagacatgggaaatgagtaccagaagtcgctcaaagtcctgttcaagaaactggaatctgagcaaggagcccgcatcgagacccggcgcaaaggatggatgatctacccgccggatacgtcacgatcagcggtcatgatccacaagactccatcagatcgcagagcatgggccaacatgctttccgaactgagacgctcaggattcaccgtctaactcagtgaagggggctggagctccagccccctttcaaccacctcccccggacaccacacaagaaaaggagaacatgatgtggcacgttcggttgtcgcttcgcgcaatcagcgaggacatgctgttcgacgccctggacaccctcgaccccttatccccggtggccacactgggccccgatgagcacaccggatcattggcggtgttcgtcgaggctgactcactgacagacgccatcgagactgcccgcacagccatcaccaacgcatgcaacaccgccaccataaccggcgtagaagcccgccccgaagacgaatgcttcgcagacgttgaccggcccctgttcccgccagtggtcggatacaccgaaatcgctgaaaccgcaggactctcacgtcagcgcatccgccagctcgcaggcaccgccgggttccc

SEQ ID NO: 422 - DNA, 880 bp, Propionibacterium acnes
  source 1..880: mol_type = genomic DNA
agttggtatgcccgcgataagaagggcaccgtcaagatgatcgcattcaactcaacggaggtccccacatgcgacgtcaagtaatcaccgcggccgtactgggcctggccctggccaccacctccctgcccgccctcgcaggcggcggcgacttgaacggcagtgtggacacggatggccctggttacgatgtgcgtactgaggtggattaccatcacaccaccggtggtgcgggtgggggtgccacgacagggggccatcatgggggcaaaacccacggtgatggtgaaggtgaggctattgatgggcgttctcgcgccgatgccgaagccgaactagacgaagccgaccgtaaccaggacttgacttgtgatgtcttgctcccaccggcgccgaataccccagccggccaggaatgggcgaaagaatgcaatcccccagcgaaaaaggggcagaaggccaccccgaagcccgatccggtgttagtgggccgtcacgcggccttgcagctcacccttcccggcgcggcccctcgtatcgatccgtcccccgaccttaaccggtggcactcggcagcagtgggccaggctttgtggttgtcggttgatgaccccaccgccactacgcagaaatcgatcacgtttatgggccaggttgtctcgttgagcgccaaacgtaacggtttgtcgtttgatatgggtgatggtcatgtcgtgcactgtgatgccacgacgacatggacggagtcggtggaaccggggaccccctcacccacgtgcggttacacctaccaacaggcagccccggccgggggctataaggtcaccgcaatcacgtcgtgggatgtgacctggtcggtactaggacacacgggcacagt

SEQ ID NO: 423 - DNA, 1061 bp, Propionibacterium acnes
  source 1..1061: mol_type = genomic DNA
gaaggttccctagacccggccgatgtgcggttctgtgggaaaaatgcttcccattggtccgtcttagttaggaaacttggcctaagtgctgtcgagggtcgcgtgttcgtgaccggttcgaagacactgccgccttgccttcttgcccgtggcgtttccgagatggggtcagtgggcgatggctaggccgatgagggcgccgctgcacaggctgggtgcccaggggaggaatcgggtggtgtggtgtcggcagcggtcgatgagggcatatagggcgatcagagtcagcccggctatgacagtgacctggatcgtgtcgatgccggttgctgcggccggggctgcccacagtggtgtgatgcgcacgtcggagaagccgaagccgcctcgggagatgagccaggcgatcatccacgctgcgaagatgatggcggtagcgatgacagcacgtatcgccgcagtatggtccgagagggcggtaacgactacagccccgatccatccggcccatccggtccacgctaggactgccggtatccatgtggtgatggcgtcaatgacggcaacccatgccccgatggtggctagcagggcccacgtcggccacgtgggtgctggggcccacattgtggcggcgatcatggtgaccgcagccgcggcacagaccgcgatcaagcttcggagactgtaggtgtcgcggtagacgatcttgtcggggctggcggtagctggttcgggcaggacgcgggtgagggcaggccatcctgcgaccgcaatagccgcgacggcgaccacccacacgatctgttgcatgggtctcatcatggcccatcatcgatgagtatgggtggccgacatggggtcactcgtagaggggatcgaggggtgtgcgggcgagcatggcttcctgtgtgccgagcatgagggtgccagaatcctcgccagccgattcccagtcgacgatgacctggtcgccgtcaacgctggattcggcgatggtcacccattgcccgtccatgtcgatgagcatcccggcggccagctctgtggcggcaaccggg

SEQ ID NO: 424 - DNA, 26620 bp, Propionibacterium acnes
  source 1..26620: mol_type = genomic DNA
ccttgtggacaccacgtcatccacatgacttgtgtcacatgattcccggaccatcatcaagcagatgctcacccaactgtaatgatttctgttctgaatctggacatgctctgacctgcattcaatgatcaattccgtgcgatattccacaacgcacggggaggtcgcagacaatgacaacagaaagcatccccacgcggctgctcgtgtggcacgagcagaccgatccgaccaagctcctcaggatcaccgacgcgatcaggaggggggatccccttccccccatcgaggccatggcgatcggccacagattcctcgtcctcgacggtgcgcaccgggcccaagcccaccagtactgccatcgatctgagatccgagcccgcctccacaacctccccctcagcgcggaaataccaggctggagccactccataccccgcgatgcagcagcgaaactggctcacctactcctccccgtggacgctctcggtcaggcggaaatcgtcctgcacggggtgcgccgtcaggtggggaccgcttcacaacgaccgcgcgacatctttctcgcctgccaccggatcgcgcgagttgcctacgcgcatggaatcagacctctcggcccggagttctccaacgctccgacgatcgacgccgccaccatgacctggcgcccgccgaacgtgggcacgttgtgggccatcgccagcagtctcggacccctgcccgcaactgtgacccggttcgccccgatcctccggcacgacgccatcggggattccgcgatgacacccgtcacctccgccgcgtgacgacccgcgccaattccgccccaccactggatgaggggcagccgcgtggacgatgctcctgttcaggcagggactccatacgagaccaataggaaaatcatgatcaaaaacacaagccctctgaccgtgaaaaatgtctcgaaaacattccgtggctccagcggagaagccatcaaggccgtgcaagacgtgtcattcaccgttgagcgtggtgaggttgtggcattcctcggcccgaacggcgccgggaagtccaccaccatcgacatggctctcggcctcacccgccccgacagcggccagatcgaggtcttcggtactgacccgctcagcgcggcccggtcgggacgctgcaccgcgatgacacagaccggcgggttgctgcccgacctcacgattgggcagaccatggagatcatctcctcgctctatcgtggctcccacatgaatgcctgcatggagcgagcaaggatcacgcatctggccgatcggcaggtgtcgatgtgctcgggaggcgagcgccaacgacttcgcttcgcactggctctgctgcccgatcctgacttcctcatcctcgacgagcccactgcggggatggatgtggaggcgcgccgggacttctgggcagagatccacgaggacacgcgtcgtggtcggacaattctgttcgcaacgcactacctcgacgaggtggacgagttcgccgatcgggtcatcctcatcaaggagggccgcgtcatcgccgacgacacctccgacgcgatccgcaccatgtcggggggttgcaccgttacggcgaccattcccgacttctccctggcacgactgaatctgccgggcacccaactcatcaagcagggcggcgcacgcgttgatctgcaccatcccgattccgatgccctcgcagcgcgagtcatccagctcggcggcaccgacctgcgcgtggtcccccgcagcctcgacgacgccttcctcgctctcacctcaaccaccaaggagtcctgacatgaccgcccaagcgcttcccgcagtcgccactcccaaggcccgccaccgatccgccatctcgctgaagtacttgtggtgcgagatgcgtcgccccttccggcgttcgacgatgctgttcaacctcgccctccccgcagttctgtacctggccctgttccgcaccgtccacaccgccgagctgccggacgggaacttcgcgatgtggatgatgatcggcatcgctgtctacggagcggccactgcgagcaccagctacgcagcctccatctccgtcgacgaggccaacgggtggacccgcaccatccgcctgacgccgttgtcgtcggtcgggtacgtgctggtgaaggtcctctgcgccatggccatcgccctggccccgaccctgctcatcggtctcatcgggctgttgaccggagctcacggcacgctgcgggtctgggtaatcggactgggggcggcttggctcagctcagcaatcttctccgccttcggcctggctctcggactgtccctgcgtcccgaggtcgtcatgcacgtccccggcctggtcatcaccggtctggcgttcctgggcaacgtcttcgtccccctcagcgggacgatgctcaccattggccgctggagccccgcctacggcatcaccgcgctggctcgttacccgctcaccaacggcatcgacatcgggggcggccacgactccctgacggctgccctcatcggcaccttctgctggttcgccggattcgtgttctgggcctcccgtcgatttaccaagagcacgggtcgtcagtgacagattcggccgatctccggaaggagcagtgttatgaccaagcccctcattgcagtggtcaccgcgggccaaggagcgcagaagcctcgcctgctcacgccatggctcaaggtccccggcgtcacggagaagcttgctgcatggtccgctcaggccgatgtggacctcgtcgagctcggtaccagggcgaatgcagaaaccttggcagcgaccgagaatgcgcagccactactggtctgtctcggagtcctcgtctcggatctcctggccgaccagaacattgtgctcgcaggacactccgtgggcgagctgacagcagcgtgtctcgccggggtagttgatcccgggacggccgtcactcttgcacgacggcgtggactggccatggcgcgggcctgcgctctccacccgaccaccatggcggccatcattggtgacaatccggatgacgtcctccggcggctctcggaactgggactcacggctgccaacatcaacggaggcggacagattgttgcggccggctccaccgacgcgatcgcggaactggtggcgacccctcccaacgggaccgcagtcaagccgttgcgagttgctggcgcctttcacaccaagtacatgacgcctgcgcaggacgctttcgcccaagctgctcaagacgtcaccttctccgacccgcagcacccgatcatctccaacctcgacgggcaggagatccggtccggcaatgacctgcgtgaacggctgattgcccaggtgaccgcgccagttcgatgggatctctgcatccagcagatcgcggatcgtcagccggaactcgccctatcggcccctccggggaaggtgcaggcgtcgctcttgtctcggcagatcccggacctcgcgacggtctgcatcaccacaccacgggaggcagcccaggctgcacagcggatcgaccagtccgtatccgtccttcagggggcatgatgctcatccccgagtacttcctcacagcctgttcggaccatgctgagcgcctggcgatcatcacccacaatgacgttgtgacgtgggccgaactggcgactcgcgtcgacggttttcggcgctggctgcgggaccatggcgtgcaccgccaggacagggtcgttctccagacgccaagcaccgtaggcacggtagccctcatgtgggcctgcctgctcgacggcgtgacgatggtcccggtgcaccaggacctcactgcctcccaggtgcagcaagtcatcgacgactgccgtccagctctggtgtgtggcagcccggacctcgtccaactcctcaactcccccggaatgaagacaagcacacctccaacgcggccggagtcaacgagtattctgccgtccttgtcccgggtcagccccgatgaccttgcgatgctcatctatacgtccggcacgacgggtctcccgaaggggatcatgtgtccccaccggcaggtcgccaccgccgcacggaccgtccatgactgtctcgggtaccgcacggacgacgtcattctctgtcgcctgccgttgtccttcgactacgggctctatcagattctgatgtctgccatctccggtagcgcggttgtcctgcgggacggaggcgcgcaggaccgcaacctggtgcgcgacatcgcccgtcacggcgtcactgtcgttccagtcgtgccgtccatggcgtcaatgctcatcaccctgcagcgtcgtgatcagttgccgaccatcgtcagactgttcacgaataccggggcgcgtctggcacccgagaccgcgaaccagttgctcgcaagcttccccggctcccgctatgcgtcgatgtatggcatgacggagtgcaagcgcatctccatccttccggtggaggagtacgagacgcatccggacagcgtgggaagagctctgcccagcactcacgtcgagatcgttgacgctcagggagttccggttccggcgggcgagcacggggagatcacggtgtccggcccgaccgtgatgaacggctactggcaggtgccgaacagtcccagtggacgattccgacccagcggccacggcctcactctgttcaccggtgatcgcggctggatggatgaggagggacgtctctacctcctcgggcgcgacgacgagatcgtcaagcatcacggcatccgaatcagcctgcaggagatcgagatagccgccgaagccgcgccgggcgtcgacgcagtcatcgctctcaagccggcctccgactcggcccccattgaaatcgcctactgcggcagcacgagtcccgagaacctggcccgccatctcgaaaccgtcctggaccgggcgcgacgaccccaattcatccaccaactccagcagatccccctgacccgtaacgggaaaccaaaccggtcagcagccgccgaggccatccgctcaagggcgtgacggcgaaggccaacacccacagacgaaaggaaaccaccatgacccaggccgagttcaaccagttcatcgagtccacctgctccgcgacgatcgtggatcccgaccgtcctttggtcgatcagggcatcgactccctcggaatgctcaccctcatggtcgctatcgaggacagcctcggcatcgaactggatcccgagtccctcgccgacggtaggggttccacgccctccggtcttctgtcccttgtcgagcagccgaaagcgacggtgtgacgacatgacgacgatggttccttgccgccgtgtggagatgccgcaactgttcgaccacatccccggaagcatctctctctcaggagggctgcccgatctgagcgtgctcccgagcaatcagatcgccgaactgacgtcccggatcatgcgtctcggctcaagaatcctcctgcaatactccaccccttcggtctcgtcctccttggtgccggccatcctggacctggcggaacgaacatgcatgtcaccggatccgcggaatctgatcccgaccgcgggttcccaactgggcctggccatggtgatcaatgcctttgacggcgatgagatcatctgtgactgcgccacctatcccggggcgctggccgccttcgcctctgccggcgtggaaacaacgggggtggccagtgacgaggaggggctcaacccagacgcgctcgctcacgccgtcgcagagggtcgggccaatggccgccgcatcgcagccgtctacaccacgcccaccttccagaatcccaccggctccgtacagtccgagaaccgccgtgcggccctgctcaaggtgtgtgctgacaatgacctcctcctcatcgaggacgatccgtacggcatgctgtccttcgacgggcagacgtggccagctctgaagtccatggacccacagcgcgtcatctacctgggcaccttctcgaaggtgttcgcaccgggcgtccgttccggctggatcgatccgcccgccaatcttgtcgagaaactccgcgctgtgtgcgagatcatgacactctcgccatcagccctcaaccaagcgatcatcggcgagtaccaccgtcgtcacggatgggacgaactgttggagggctatcgcgcctcctaccgcgaccgagcccgtctcctcatcggggctctcgaggctgaactggcaagaacgaattgcactggcacgtggacctggcgtgaaccacggggcggcttctacctgtggttggagaacgtcgccagcaccagcggtatcgacgttgcgcgtcgcgccgccgacaacggagtggccgtggtgcccgggaaacacttcgacgcagccggacacgattcgccgagcctgcgggtgtcgttcagcaattcacgcccggctgatctggtcgaaggagctcgtcgtctcgcccgtgcactggtgggagaggacgttcagaaatgactctcgcgacacgcaccgccaccgacaccctgcagcagaccttgccctggggcacccacgaacgtctcgtcttcgggcgggcgctcctgcgcagcaccggcttcccagccgaaggcttggccctgctcgactccgacgacatcctccccctcctcgactcctttcttgccggggacatcgacagaactcacttcgagaaggaatacaccagtcgcgaggagtccggcgcaagggcgctcatcaacgtcttgaaggacgatgcagtatcgcgcgccatcgcatggcagaaccccaccgcgtggaggtccttcgaatccctgtcgtccacgagcggaatcaatgcttcgactcggcgcaaggtacgccaactcgccctctactggcaacgttactgttccaaggctgagaccattggatacttcggcccgttcgcctgggccgaagtcgacccggaggcctctgcggtcgaattcatctcctccgaccatctgatcgaccgttcccacgtcgcaatggaggcgtgggcggtcattgagatcgggaaagccctggcatcacgggccgaccttcagtggtggatgccaccaatcctgtcccccgccgtcgacctcaacatggagagaggcaccgtgacggtggctggacaccagccacgacgggtccgggaggacgaggcacgagttctcttcctgaccgacggcacccgtcccgccgcccagatcgccaagagcctcgacatggagcccgagcggttgcgcaggatcctcgtggcccatgaacgtcgtcacaccgtgatctgggacgccaacatccctgtctcagtgcacgcgtgggacatcctgcacgaacgcattgcccagatcggagacgctgggctgcgagatgaggccactgctgttctcacgaggttcgacgagcttctggaggtcatccgcaacattcccgacgcccggtccctgacggaggcgacggaatccctgtcccgtcttttcgaaaccgtgacaggaacctcttcgaacagacgtgcgggccaggcatatgcagcccgcagcctgtgctacctggactgcacccgcgccggaaccgccaaggttgggacccggcttctcgaagccctcgacgcccccctcaacctcgtcctacaatccgctgactggttcgcggcgaccttggcaaaggaatacaccaccgaaatcacggacctcgcaaatcgaaagcagcgggcctcccaccagccactgaccatggctgatgtctggccgtccacgatgtcgctgttctggggggactcaccgtccccactgcagcgagccgtgaccgaactgtcacggcggtggagcagagtcctcgaggggctgcagccagtcgacggtcgcatcgacacgacatcgtccgctctctcgggcgccgtggacgagcagttccccgtgtgcaccccgattccagaactgtcagtgcacagcccggacctccaggtcatcacctcgagcactagcaacatcgcctccggacgagtcactgcagtcatgggtgagctacatgcctgtctgagcagtctcgacatgccgttgctcgagtggtcgctgccccatggttccattcgcgatcgcatcaacaccgcgctcaacctgcgacgtctggttcccttgttccccgagacatggaggcgcaacaccggccgcatggttccagcgacggtcggagtgggggatcgcgcaatcgggttcactcggacggccgatcaagaccgtgcgaacacatggtcgatgtcggcactgctgttcgagcagaccgaggacggactcatgatccgtgatcccgatggcaggctctggaccatcgcacaagcgtggagcgtgcccatctccatggtcgccgccgatgcgttcaagatcgggctgcccggctcaccagcccctcggctcaccattgacaatctcgtcgtgttccgtcgtacctggaggtttcccgctggctccatcgacatcatgcacggttcagccgccgagaaacacgctcggctgagggagtggcaggtcacgaatcaccttcctgaccacctcttcgtcaagttcccctccgaacccaagccgatctacttctccttcgagtcccccgccatggccacggtcttcacgcgatcactgcagcgcgacgcccgagagaatccagacagtctcgtgacgatgtccgaagcactgcccgagcctcaatcctcatggctgcacgacacccggagccaccactacgtccacgaattccggctgcaactgaccaaggagcgacatgacgaccacagttgagacacatcccgaaacacgtggcacaaccgcgacatccatctccaatctgatcggtcacacccctctcgtaagaatggaccatctgttcgacggcctccccttcgaggtgtacggcaagctcgagaagctcaatcctggcggaagcatcaaggatcgagcagcacaatccatgatcgaacgggcaattcgacggggtgagatcgtcccgggccgtacgaccgtcatcgagtccagttcgggaaatctcggcatcgccgtggcgatactgtgccaggagcacggcctgaatttcatctgcgtaaccgatgccaaggccacgccaacgaacattcgactcatcgaagcgttcggggccactgttgaggtgatcgaagaacctcatcccgagagtggcgaattcctccccatgaggctcaagagggtaagagaactgctgtcagagattccagatgcatggtggccgaatcagtacgggaaccccgacaatccggcggctcacgagcggactgtccgcgagatcatcgaggcaatcccgcgggttgacacgattgtctgcgcgaccggctcgtgcggaacccttcgcggctgccacgaagcattgcgaaagctgtccccacgcacccgactcgtcgccgtggacgccaagggcagcgccatcttcgacgaggcaggagcaccccatccccgctgtgtcccgggacacggtgcgtcagtgcgaccgccgctgtggcgcgcggggctcgccgaccaactggttctggtctccgacgcggactgcgtcgtgggatgccaggaggccctgcgcaccgaggctcttctcctcggcggatcctcgggagcaattctgacggccattcaccgagtgtctcccacgattcccgctggttccaccgtggtgacgatcctccccgacggcggcgagcgctacatcgacaccatctacagccgctcgtgggtcgactcacacatccccgggctgccctctctcgccgactggggggctcccaaccccgccaattcgtatgacctgaacagaagtgcctcatgaagctctacaccagagagaccgtcgaaactgcgcttgtcgggcgtcatggccaggttctcagtgccgtacagagtgcatacatgctgcattcgacgggagagacatcgctgccattctcaaccttcctccgcccggccgggtatccgaacgatcggatcatcgcacttcccgcccacatcggaggcgacttcgacatagccggtatcaagtggatctcatccttcccggaaaacctcgaccggggccagcaacgagcttcctccgtactcatcctcaatagtctggagacgggatacccgaccgccctgctggagtccagtcagatttcagcaacgcgaacggcagcatcagccgccctggccagcgccaccctccatggctccgaagaccatgtcagcacgattggcatcatcggctgcggaacaatcaatcttgcaacgatcgactacctcttccacgtgcacccccagatcaacgaggtcctctccttcgatctgaggcgggagcgggcccatgagttctcgcacctcgtcaaggcttcgcacccagaggcccgggtccgtgtcgccaaggagcccgacgagattctggccgcaagcaacaccatcgcgatcgccacgaccgactcgagtcattggttggaccttccgccgtggcacgggccggggcaccaagtcgtcctgcacacgtcgctgcgagacctgtcagtgccctcgatcctggcagcggccaacgtcgttgacgatcctgatcacgtctgccgtgaagcgacgtccttggatctggcaactcagcagaccggcaaccgggacttcatcacggggagaatcggagacctccttcttggcgcgccgctgtcctcaagtcctgactcccgtgtcattttctcacccttcgggctcggcatcctcgacctcgcagtcgcctccgtcgtcattgctgccgcctcctcttcagcagtcgagatcaatgggttcgaccccgggaaacacgccacaagcatgattgaggtgaatcgatgaccaccacacagatcaacgacaacacggccgttctgcgcgacgtattccccgccggctccgtcgcattcgtgagcggtgcctcacgcggaattggcgctgcctgcgcgacagcccttgcggccgcgggatgcaacctcgccatcacttatcgaaggaaggagaacgaggcggcacaaatcgccgaatccattgaagccatcgggcgccagtgcatcacaatgcagatggacgtaaccgatgagaaccaagtgaccagagccttccgcatcattcgccagcattacggacgcctggacgccgcggtcttgaactcgggaatcaccagtgacgggcatcttgcaacaatgagccgctccaagtggagctcggtgatcgacacgaatctgaccggaaccttcctctgcacgcgcgaggcgaccaaggccatgtactcgtccggtggctcgatcgtcatggtcgcgtccaccagtggagttgcagggcgaccgggccaggccaactacgcagccagcaagggcggaatcgttgccatgatgaagacgctggccccggaggttgcggcaaagaacgtccgggtgaatgcggtggcacccggcttcattcagaccgacatggtggcggccgttccaaaagcggcactcgcccaggcaatccaacacatccccatgggccgtcttggcctggcacaggaggttgcgtcagccgttaccttcctggcctccccgctcgccgcctacatcacagggaagaccctcactatcgatggcggaatgatcaacggctgaccccaggacccgcacacccccagtaccgagaaagaaacaacaatgaccgagatcacccacactgccaacagcatccgaacccgcgccgaggaacgttccaacaaagcttggcgcctgaaggaggagatcatctccaagctcggtctcgagaccaagccagaatatgtctcggacaaccaaccgctcttcggacgtggccttgagatggattcccttgacactctcgaagtcgtcgtcgccgtcaacaatgagttcggagtctcggtcaacgacgacgacgtacaggcgttcggctcgatcaatgccatggtcgatttcatcgaggtgaacgagaagtgagttctcttgcgctcgaggcgccacccaaggacgcccgtaagaaattcgcctacgacagcgatgccatcaagacgatgctcccacatcgttggccgatgctcatgattgatcgcgcctacgacgtcgtcccagggaaatcgggcaaaggcatcaagtcggtcagcgtcaatgagccgttcttcgccggtcactaccctgaccattccatcatgcccggcgtcatgatcgtcgagtcgatggctcaactcgtggccgtcatctacgtagccgaggccattcagaacaatcccggcatgacgtcgcacgacgcacgttcaagcgttggttatctcggcgcgatccgtcagatgaagttccgacgcctcgtcactccgggcgaccaactcaccctccacgcccagctcggcgagaaagtgggggctctgcgcgaggtttccgtgagagcactcaatggccgggatgtcgtcgcccagggggaactcgtcgtcaccgagcggtgacacccagccacacacgagaaggaagtcccatgatcgttcgcccctacaggccacgtgatgcggaagcgatcgtacatctctacaacagccattccgactcccccaatccagtgtcgggagggattgttgaggaggagttccagagggagctcgaagaacgtggttcgacagtgttcctagtggccgaggaggccggatccattgtcggcacattcgggatgttccgcacgaatggccgacacaccatggccgatgatgaagtcttcgccgacatgttctatgtcaccccgtcacatcgactctcgacagttccgggacagctaatcactgaagccatcagcgagtgcttcatccagggcatcaacgtgatccgcctcaccgtgaaccccgcgaacatctccgcgctcaaggtttacagaaaagtcggttgtgcctgtctcggggccaccgatgcaggcgaggacgggaacattgagctgtacaacttcatccctctggttcttagggcaaccatcaccaaactcgaccacgattgtattcgagccctggcggacatgacttcgttcgcctgcatcaccgagggacgtccacttgatctgtcccacgacttcatcgtggacgctggacggaagatcgtctcccacagcatccagatcgggcgttcaaccatccacgccatggtcgacacgggctcgaggaccattgtggaggccaccctcgacaaccgcgactgggatgctcctcgccagatcgtcgcccccaccccctgtcagaaccggcccgaggaacagcgaggcaaccctgtccggctggtgcacaagaagcttgaggtcaccttcaacgaaggagtcattgagatcagtacgactggccactggggcccggtcctcgcaatgtcctggccctcctccgtctcgcaccgcgctcacgggtggcgacagggccccgccaagtcgtatcgatgcgagcttctcgagaattgcctcgtcctggatgacgaaggaggagtgaaatgcaccatcagcctcaatgattgccaagtcgcgatccggatggatggtgccccaaaaacggaattgagaatgtaccagtggtgcagcctgcgccagggctatctgacggctgacaccggcatcacgagcttcaaccgggcatccagtgggctcggagtcgccgtccgggactcgtccgagattgtcgccgcgggccttcccgtcatccctgacacaccgatcacatggagtgagggtgacatcacggttcagctcgatccctgcggccgcgcctccctgatccactcgaccctggtggaccgaagaatccacttggacgagtctggctcggcaagtctcaccatgaccgtgtttggtgattcccagccccatcgtgccgacaccgtcgagctgcctcccctcgcggcaggcaccgacaggatcgtcctcaagccggctgccggaggcgtgaccacatggcgcttgggcgccaccaaggtgctcaagtcaccgtggccacacgcccgcgcgctcgggcccaatccgatctggcgagccggcctgtgggtcagtcacgagccggatcgccacgaccgtcgccaaggaatggggtggggtcccgatcatcgcagttggaccctgtcggaagacaccatgaccagtactgacgggacactctcctggcgcttcagcggctcccccgacaccggctggacggtcgacgtcacgacgagcaacacgcacggggagaccgtcgtctggctcaccccggactgcccggcgggcgagaggatccgcacgtctgatcatgccgtgacgaccatgcttgacatctcgaagccatggcagcgctggaccacccgatgcgcaattcctctcagacacgggaagtggttcctcatcgagcctgatcatgacctcactgattcccccgaaatcctcatgcgctctgttcacggggtcctgctcgtcggctgtgtcggacgagcccactccggatccgcttcctggcgctttgccatcacgtcagaactccccacctccaacccaagaagaaacgactacacctcagccgcctgaacccaaccagttggaacacccactacagaagaaatggagcaccaccatgtccatcactgagcagtacaagacccttcgcacctcggtcggcctccacacgcctaccggtcccctggtccgtatcaccggtgatgatcgtctcgagtttctcgacaccttcctgtcccgcgcctcggacttcgtggaccccgacaccactcgggagtgcctcgctctcaccgaggacggccttccgctgacgatcttcctccacatcgagcgcgaggaggagtcatggctccttccccgcaccgccatcgatgcggcgaccctcgccacgtacctcggcaacctcgagaccgatggtgacctgtcaatcgagattgctccagagggttggggagctgtcgctgtcgaggggccgctgtcgtggcagatcgccgaaaaccttctcgacttcgacgtggctggcctcgttcttcacgccgtcacggacgtcgtcgttcccggggcccccgagggatcgaaggcatggctcgcccgggtcggaaccactggagagtacggctacctgctcgtctccaacgttcccgacctcgcccgcacttatctcctcagccgcgccacggagctgggcggtcaggcagtcgacgccgatgctctcgcacgagtccaggccgaggccgggatgccctattacgcgatgggcgtgtgccacctcgatgtcgccgggggtgacctcgcctggctcgtggactggcagcgcatcggcgagttccaaggatccgagaatctgcccacacccgtccgagaccagcgccgactggccgccatcgccctgcccaccggcaaccgcccggaagctggtcagaccgtcgctgccggggatgaggagattggaatggtggtgtacgtcaccccgtccgccaatcccgatgaggaactcgcgttcgcacttctggatgctcctttctggactcccacccttccgttgaccgtcggtgcccacgacgggaccacggtcaccctgccccgcgtcgtggcagcctccagcctcaacaagctggggtgacagcgatgacgatcactgctgagaacgccaccacccgcagcgacattgcccggagcattgcggtgaccggcgtgggactggtcacggcacagggtgaccataccgacgagtgctggaccgaacttgtcgatggggtttgcggaatcaccatgaacgtcacgttcgatgactctggcaccacgattccgtgtgctggcgtggctcccattccgaactctgattcgatcgaccgctgttacctgctcggcgtccatgccatgcgtgaagctctcgagatgagtggcatcgacctggactccgtgggtcgtgatcgcatcggactcgtggtgggctcaagcctcggcgcgatgcccaccttggaggcggctcatcgccgggccattgagaccggcgtgctcgatgccggattggcggcagactcccagctccactgcgtcgccgaccacctcgccgctgagttcgacatccgtggaccccgcgtcgtgacatcgaatgcgtgtgccgctggtgccgtggcgatcggctacgccgcagaactcctctggtccgacgatgtggacctggtcgtctgtggcggtgtcgatccactggcccagatctctgccaatgggttcacgtgcctgggagctctcgacaatctcccatgcagcccgatggccggttcctccggtctgactctgggcgagggagccgggttcatggtcctcgagagaacagatgcggcggctgccagaggccaggaggtgatggccgaaatcgccggctacggcacaagttgtgatggttaccaccagactgccccggacccgggtggcaatggcgcccgcagctcaatggaggccgccctgcgctcagctcatctcaagccgtccgacgtcagctacgtcaatctccacggcaccggtactccgaccaacgacgccgtcgagccgaaggcactccggtcattgttcaagtccgatgaccttccccctgtcagttcggtgaagggcgccatcggtcacactctcggcgctgctggcgccatcgaggccgtgtgctcgatcaaggccatccacgagggggtcctgccgccaaccgtcaacaaccgcgggcaggcttcccgaactggtctcgacatcgtgccggagtgcgcacgcaaggccgctcccgacgtggtcatctccaactccttcgccttcgggggcaacaacgcatcagtggtcatcaccgcacctcgaggaggcgttcactgtaccgccccggcgcagcttcgcgaggtcggaatctcaggaatggcagctctggcgggaaaggccgccaactcggaggagcttctttcggccctgtcagaagattgtccaatctggatggccgatgagaagacctgggaaggggatgctgtccaaaccggccatgtggacatcaagcgcctgtcccgcacaatcaacccgtccaaggttcgtcggatggaccccttgggaatcatctccagcgcggtggtgactgatctgtatgcccgacacgggaagctgagccgcaaggatgccgaaagcacgggaatcatcttcgcaaccggctacggtcctgtgacggcggtgacgcagttcaatgacgggatcatccgccacggttccgagggtgccaacgccctggtgttcccgaacaccgtggtcaacgcagccgcaggccacctcgcgatgctgaatcgctaccgtggttacacggccaccttggcatgcggtggaaccagttcactcatggcgctgcttctcgctgctcgcgtcgttggccgcggcgctgcggatcgcatcatggtcgttatcgctgacgagtttcccagcattgccgtccaggccgtcgcgaagcttcctggctaccgacacagggttgatggttccggagccgtgctctcggaaggcgcggtatgcgtcctggtggaggccgtcgaagtcgccgaagcacgcggtaccgcccccatggcgctgctacgcggcttcggatcccgtggagagtccgtgggagtcggtcacaccgcatccgatggacgggcttgggccaaggccatggccgctgcactgggcccggccggcctgactgcctccgacgtgtcgaccgtcgtggcggcatcaagcggacatcctcgcgtcgaccgagccgagcaggcggccaggcggatcgtcggactgtccgcaaccgctacgaccttcccaaaggcgattgtcggagaaacacacggatcggctgccgggatcgggctgttcggtgccctgtgcggttcgaggtcagccgcgcaccagaacatccttgtcaacgccttttcccacggcggtggttatgcctcgatggtggtggagtcactgtgaccacgacgcttctgccacgggttgcccagccgggaccgggcgtcagccatgtcgacaccgaccgtcccatcgagtgcatcatcacccaccacccccacatgccgcgtgatcgcggaggccacgccacctccgtgtcaggcaggtacttgctgcgccaagccgcagaactcatgctcggcacggatcctgcgcattgccccgtcgtcgacccttcgcggcgctggtactggcccggaatcaatcttcacggttctgtctcccatgtcccgggctggagcctgacgacgctgagcaccggcggccacatcggggcagacatccaggacttccgggagcgtcccggcgcaatggcattcatcggtgacctggtcaagctgtcgcgatcggcgtcactccgagaattcgcggagtgcgaggccgtcgtcaaggtgtccgaattgactaaggagacgttcgggcacgtgcgactgcccgaatggacacccggatggcgccacgttttcgaggactactgggtctggagtctcgagatgcacgggatgggagtcatcgcactcgcatccgatctcccccgagccattcgctggtggcggtgcgacgccgatgcccgtggccgtctccaggctctccgacccataagcagtcttggaccaggaaggccgtcatgagccggtactcacgtcgaatctcaggcatcgaacgcggctatctcaacgccgcaacccggggcccgcaccccaccatccacacgatgatcgacttcgagggccgcgtccccgccgactgttggcggcacgcatccacgattgcgtcggccgccaaccctggcatgacagtggtccggaggtcgggccgatggacatccgatccagcgggctgtccggttgtgttccacgactggaccgcggaccccaacgacgttgccgacttccacgctgacatggatctcgtgacgggaccatcgtccacgctccacgttttcgagggggcggaacgcacccgaatcaccttggcagcaagccatgccgtgaccgatgggcggggcatcgaacgatttctcgtcgacctgcttgcagcgttggacgagcgtgaacccattggaagccccgacaccctgaccgatgtcgatatcaaacgatccttggagaacagcatcaagccccgacgccacctggccgctgtgcccgccgatgtcctttctccactgggggggaggaagaaccaacgtatatgggcctccaggacgtggcacagtgccccgggagccatgagcggaagaatcgctgccgctgtggccgagatgatcgaccacgccgcaatgatcatcatcccggttgacatccggcggcacgtcccagaggtccgatccacagcaaacctaagtgcccaactgccagtgatcatcaccccgaaccagcgctggcaaagcatccatgggcatctgctcacggaccttgctcgccatcgagaccttgcgatcatcagtgaggatttccgccacaacaatccgttcgcatcgaccttggaggaaagccaggccatcggcctcgatggtgtctatccctgtgccgcaatcatctccgaccacgggaagctcgacctttcaaggttccagaccttggaactcaccccggtctcgatgcgaagcctcccgatgctcgttccctactccgcaatgttcatcagcagttgcaccgtcggcgagaccaccactgtcaccatcgctcatcgcgctgatgacgatcccgattccataaacaccttcttccaccacatcgaatcccagatgtccatctgagccacgtcgtccctggagagcaaacatgaccacccaaaatgtcatcaccccgccgcgccccgtcacctcccatgccacggcgaccaggtccgaggctccaccgcgaagcgtcatcagagccatggccatctcgatggtcgcgaccctcatggtcatgctcgacacgaccgtcgtgaacgtgtccttgagcgcgaccaccgcccgcttcgggagcatgggcagcgtgcagtgggtcctcacaagttacctacttgcactgtgcgcgacgatgacggcctccgcctgggtcatcgaccgccttggtccacggctcaccttcatcgcctcaatgaccatgttcctcatcggctcggtgatgtgtgcactgagcgattcagtgtggcaactcgtcactggcaggaccatctccggtgccggagctgggatccttgttccgacagcatccgtcctgcttatccgtggcatcccacgcgaacaacttggcagggtgcaggcactgaatgggagtgtccagttgatcgctcccctgatcggcccgactgtgggcggtctcctcgttgacaggtgcgggggctggccggccatctactgggcgaacgtccccgtagctcttgttcttctgattgaggccgtccgcgtcgatccggacgaaccacacaccgctaagcgccgcctcgatgctctcggcctggtctgtggcagcaccgcgatcgtgctgacagtgcttggtgtctcactcttcggcaggacgtcgcgaaacaccaccttcctgcttacgatcggcgcgcttgcagtcctcgcatgggcgttcttcatcacccacatccgaagggctaccaaccctctgcttgacgtttccctgtatcagaaccctgtctattcatggtccagcttcaacgtagcggtgcttggtttcggtctctacgcccccatggtcgtcatgcccctctatctcgaggcgacgcgccacctcactgccgtccacactggtctggtgatgtcagtggccggcgtcggcgtcattatggccggaatcctgtgcacgaagatcatgggccggatcggtggaggcctcacgatgacagttggcataactctgagcatcatcgccactctgcccctggtccggctgacgaaccacacctcctacatactcctggcagtctgcttggccttgcgtggagcaggaatcagcctgacaatcgtcccagccatgacacgggccttcgagtccatcaagaggacggccatggcggacgcctctgcacagctcaacctgttgcagcgaatcggcgggacaattgcgacagcagtcatcatcgcagttatccaccacgaggccatgctcacccgcggactctcccccacagtgttctcgcacgccaacgtgtggatcctcaccgcgaccgccgtcacccttctgccggccttcgcgcttgcgaaggccgaaagacaacagcaggatctctgagcaccgaggagtactccctcgtagaccctcctctgatctaattgggttcgttccaagtgtgtatctcactccggggagccccgattgctgaaccacatcccgttcaccctggcgagtccctcgtggtacgacgtcccctgggcgcccggatctccgtatctcacaggagatatctcggtcctgccagcggactcgccaaggtggacgacgaccatccggggtccttggcaaatccacatgccacctcgtccgacccttccagaggtggggtggaaagtgcatgtgtctgccaagccatcggaattggaatcggttgcctcagtcgtagcactgtggtgcgtacgccacagcgtccccttcaaagtacttcgcacccgaggtctcgttcacgcgagtcaagtcaagtatgcggaccgaagtcagagcggcaaggtctgcacctgctaccccgacggcgagagccttgagcacttctgctccggtcttgccgagctgcttcagaacgtcgattcacctccggtgtccggcgagctgcgagtcggatcctcccctctgtggttgcgtcacgggagtttccgagaggcatgggcggtgtcatccacaggagtaccgttcccggtctacccgggaacaacacatcctgatcgtcgaggccccgcgcccgcagaatccgatcacgacacgccgtggatccggaggctccgtcggacgaatcgccccagcacggttcttcccatcgacgatgtcagactcctccaccgatcaaatgctggcggcgtgtatcaggcaacatggagagacggcacatcggtagtcgtcaaggaggcccggcacctgtccggacttgatgcggcgggtgtcgacgcccgagtgcggctgcgtcacgagtacgaggccctgagaagactggacccctatcgggccgctccccatcccattgatctcattgagaccgaggacggctcgttcctgatcatggaattccttgacggaatgacagtccaccaggagatgtcgaggttccatcctctgattagtaggcgacctcatcggctatcgatgaccgatttttcacgctggtgccgagaggtcgaagatcgcttgaggaatgtcacgagggtcatggccgggtgcggaatcgttcacggggatcttcatcccgcgaatctgatacatgtcggccatgaggttttggttactgactttgaatcctgctcaatcgacggggtcgccgtctcgtcagggatcgccgctccctggttccagtcggacgacacgattcccgatccggcgacgactgacgatctccacactcttctcgtggatccgacttgcggccccgcgcttgtcccccatccaaatcttcgcgcgctcatcagccaggccgcagtcgaggacatgatgggaaatccgactagtttaccacatgcctggaacctcgaggacatgacaagcgaactcgccaaggggatccgggcatcagccactcccgcacgagccgaccgcctctttccctcagacccctacctgttcgggcatccaggttcagaattcggcctgatgcatggcgccgccggaatcatggctgctcttgccgtgactgggtacggtgttgacgcgaatcacgtgacctggatgaaggaccgcttggccacccgcccgaccctgctgccggggttggccaacggaatcgagggaattgccctgggtctctccctgtgcggtcagaacgacatggctgcatccctgctccaccagtccggaattctcacgatcacaacgaacggatcgactgacctcaccctcggtactggtatggcgggccgagcgtgcgcgctgcagtccctctcacaacgactgtcatcgaaatctctcgcccacgctgcatataccctctgggaacaactcgccgtggctgtgcggaacactgatgtggccttgccgaacggcctgttctccggttgggagggaatcgggctctccctgcttgcctctcccctgccggatcgtcatgatctcgcccgccactcactccgactggccctggccacgacaacgattgttgacggtgcgctcttctcaggcgagggacagatccgatggccatatctggggcgtggtcccgcggcatgtggcccgctcgccgccaggcttgatgatgaccagacggccaaggccgtggcacagacctgtcgttgtcccctgactgagtcatccggtctccacaatggccgcgcaggtctcctactcgtcctccgccagctcgtgggagaccaagacgacgccgttcgccgccacctcatgagactgtcgtggtcgatggaccgtcgcgaggaaggcacattgctgctgggtgatcatggcctgcgtttctcatccgatctcgcgacggggtcagccggcgccctcctcgccctgagcagggacccatggcggaacatgacacgaatgctcggaatatgcgatgacacctgtcatggcccactagtgacagtttgatctagcgccgatagttcacaactgaaagactccaaacatcgaggaaaacatgctgagccaaaacgccttggcaggcgtggctcgtttcaccacgatgaacaccaggagacagaatgtccgttgaggccatgcaatccatcgagatggacgaggaaaacagcgccagccagacagtttgcgcttgttacagcttcttctcgtggtcaggatgctgcgtagtctcccaagcggtggaagcatcttgatcgtgtgagacgccgtcgactaccctgtcccccgtggtacgcacacgccccgtcctggacagtcccggaagaccgctcatcgcctccggagtcgtcctggcggtcctgctcatcatcgcggtgatgacgatggtgcttcagcgcgaccccactctcacccccggacgccgcattctcggtatcgtcctgtccacggtccaggccgtcggattcatgtggctgcagacccgcatggttcgtcacggcaagggttcgcgcaacatgcgtgcgacccttggaagggtcggtttctgggccacgtggggactcgtcgcagtgggagtcgtcaatctgtggctgaccaactcgtggaccctcttcggggcctccgtcgccacgcccctccttctcctgccaggggtgtggagtgtggtggccaccctcgtgaccctgatcgtcggtttctccgacctcgtggtcacccacacctcgccactgacctcagccacggtcgtgctggtgaccatcgcggtgtcggtgaacctctacgcattcacgaagctgtcgacggcactcgttgaactccgctcctcccaggaggagatcgcccggctgcgcgtggacgccgagcgtcaccggatatcgcgggacctccacgacatcatcggtcgcaccctggtcgccacgtcgatgcgccagcaggcggccctccacctcgtcgaccgcgacccgcaacgggccaaggaacagctcgacgccgcccatgacgcaatcaccgaggggcagcaccagttgcgttccatcatccaggccgagatgagcaccagcctccccgacgagatcagcgacgccacattcctgtgcgaccgactccacatcgacttccgcatggatgaccgcggcagaccgcacaaacccttcgactcggcggcggcggcggccctgcgcgagggaatcacgaacatgctcaagcacagcgcggcgggctactgccacgtcgccatctccccggacctcctgaccgtcaccaacgacggttgtccgcaatcacctcgcccctccaccacaccgggcaccggaatcgaccatctccggtcccagatcgaggcgctcggtgggtcggtgacgacgtcgcggccctcgcggggcaccttccggctccgctgctccttcccgacccggggggcgtccacgaccacacccgcgaccgaaggaggacgatgacgacgagaatcctcctcgccgaggacatcaaactggtggcagaggccttcgaggcactgctctcggtggaaccggagttcgaggtcgtcgcacgggtggcacgcggcgacgacctggtcacatccgccacccgcctgttccccgacgtgatcctggccgacatcgacatgcccgggatgaccggcatcgaggccacccgaatgcttcgcgacaagggataccgcggcagaatcatcctgctcaccgccctgccgggaagcgggcacctgcacgccgcgatggctgccggagccgacgggtacctgctcaagtcgatcaccgcgccctccctcatcaacgccatccgggcggtgtgcaacggccagtcggccatcgacccgaacgtcgccgcggtcgccatgcgcaagggaccctcgcccctcaacgaccgggaaaccgagattctgcgcctagtcgccgacggttcctccaccgcgcagatcgcctcgcggctgtacctcagcaagggcaccgtcaggaactacctgtcgacggcgatgtcgaagctcgacgccgactcacgcacagcggcggtcacgcgggcacgcgaggagggctggctgtagcaggcgacccgctcagcccaccgcccctcagcccgccgactcctgacgcacggcctcctcgaccgcccggctgagcagggacccggccctgaccatcgacgtctccgggtccggctcgagatcggacaacgcgatgatccggtcgaacgcggaccgtttctcctcgggcaggtcacagcgtccgcacaccgcccagacgggcaccccggcgtcccgggcgatcttgcggatggtgtcgggaagcttgccgagcagggtctgctggtccagccgcccctcccccgtgacgacgagactggaggcggagatccgcgacaccgcgcgggaccatcccaggacgaccgccgcgcccgggcggtacctggtccccaggcacatcagcgcccagccgacccggctgggcggctgcgaaccccctggccaccgcccggcaggcctttcccgaactcagcgaccccttgaaggagtcgacggcaacgatgaccggcgcattcggatcaggacgcatgggatcagcatgtcacgtcgatacggagcagtcgcgccgcctacccctagactcgggggcatggtcaaccgagtctacctgtccctgagcgttctcgccctcgtgctgtgggtggtcgcctaccgtcacatgccgggctgggccgcgggcatcaccctggtgggcatcgtcgtgctgtcgctgtggtgcgagtggtcgcgggtgcgcaccctggccaggatcggcaagtcccgccagcagggcccccgctcctcccgaggacgcaacctgtcgtgagcaatacgattcccgcagccctccaccccggccctgacgaggcc

SEQ ID NO: 425 - DNA, 26620 bp, Propionibacterium acnes
  source 1..26620: mol_type = genomic DNA
ccttgtggacaccacgtcatccacatgacttgtgtcacatgattcccggaccatcatcaagcagatgctcacccaactgtaatgatttctgttctgaatctggacatgctctgacctgcattcaatgatcaattccgtgcgatattccacaacgcacggggaggtcgcagacaatgacaacagaaagcatccccacgcggctgctcgtgtggcacgagcagaccgatccgaccaagctcctcaggatcaccgacgcgatcaggaggggggatccccttccccccatcgaggccatggcgatcggccacagattcctcgtcctcgacggtgcgcaccgggcccaagcccaccagtactgccatcgatctgagatccgagcccgcctccacaacctccccctcagcgcggaaataccaggctggagccactccataccccgcgatgcagcagcgaaactggctcacctactcctccccgtggacgctctcggtcaggcggaaatcgtcctgcacggggtgcgccgtcaggtggggaccgcttcacaacgaccgcgcgacatctttctcgcctgccaccggatcgcgcgagttgcctacgcgcatggaatcagacctctcggcccggagttctccaacgctccgacgatcgacgccgccaccatgacctggcgcccgccgaacgtgggcacgttgtgggccatcgccagcagtctcggacccctgcccgcaactgtgacccggttcgccccgatcctccggcacgacgccatcggggattccgcgatgacacccgtcacctccgccgcgtgacgacccgcgccaattccgccccaccactggatgaggggcagccgcgtggacgatgctcctgttcaggcagggactccatacgagaccaataggaaaatcatgatcaaaaacacaagccctctgaccgtgaaaaatgtctcgaaaacattccgtggctccagcggagaagccatcaaggccgtgcaagacgtgtcattcaccgttgagcgtggtgaggttgtggcattcctcggcccgaacggcgccgggaagtccaccaccatcgacatggctctcggcctcacccgccccgacagcggccagatcgaggtcttcggtactgacccgctcagcgcggcccggtcgggacgctgcaccgcgatgacacagaccggcgggttgctgcccgacctcacgattgggcagaccatggagatcatctcctcgctctatcgtggctcccacatgaatgcctgcatggagcgagcaaggatcacgcatctggccgatcggcaggtgtcgatgtgctcgggaggcgagcgccaacgacttcgcttcgcactggctctgctgcccgatcctgacttcctcatcctcgacgagcccactgcggggatggatgtggaggcgcgccgggacttctgggcagagatccacgaggacacgcgtcgtggtcggacaattctgttcgcaacgcactacctcgacgaggtggacgagttcgccgatcgggtcatcctcatcaaggagggccgcgtcatcgccgacgacacctccgacgcgatccgcaccatgtcggggggttgcaccgttacggcgaccattcccgacttctccctggcacgactgaatctgccgggcacccaactcatcaagcagggcggcgcacgcgttgatctgcaccatcccgattccgatgccctcgcagcgcgagtcatccagctcggcggcaccgacctgcgcgtggtcccccgcagcctcgacgacgccttcctcgctctcacctcaaccaccaaggagtcctgacatgaccgcccaagcgcttcccgcagtcgccactcccaaggcccgccaccgatccgccatctcgctgaagtacttgtggtgcgagatgcgtcgccccttccggcgttcgacgatgctgttcaacctcgccctccccgcagttctgtacctggccctgttccgcaccgtccacaccgccgagctgccggacgggaacttcgcgatgtggatgatgatcggcatcgctgtctacggagcggccactgcgagcaccagctacgcagcctccatctccgtcgacgaggccaacgggtggacccgcaccatccgcctgacgccgttgtcgtcggtcgggtacgtgctggtgaaggtcctctgcgccatggccatcgccctggccccgaccctgctcatcggtctcatcgggctgttgaccggagctcacggcacgctgcgggtctgggtaatcggactgggggcggcttggctcagctcagcaatcttctccgccttcggcctggctctcggactgtccctgcgtcccgaggtcgtcatgcacgtccccggcctggtcatcaccggtctggcgttcctgggcaacgtcttcgtccccctcagcgggacgatgctcaccattggccgctggagccccgcctacggcatcaccgcgctggctcgttacccgctcaccaacggcatcgacatcgggggcggccacgactccctgacggctgccctcatcggcaccttctgctggttcgccggattcgtgttctgggcctcccgtcgatttaccaagagcacgggtcgtcagtgacagattcggccgatctccggaaggagcagtgttatgaccaagcccctcattgcagtggtcaccgcgggccaaggagcgcagaagcctcgcctgctcacgccatggctcaaggtccccggcgtcacggagaagcttgctgcatggtccgctcaggccgatgtggacctcgtcgagctcggtaccagggcgaatgcagaaaccttggcagcgaccgagaatgcgcagccactactggtctgtctcggagtcctcgtctcggatctcctggccgaccagaacattgtgctcgcaggacactccgtgggcgagctgacagcagcgtgtctcgccggggtagttgatcccgggacggccgtcactcttgcacgacggcgtggactggccatggcgcgggcctgcgctctccacccgaccaccatggcggccatcattggtgacaatccggatgacgtcctccggcggctctcggaactgggactcacggctgccaacatcaacggaggcggacagattgttgcggccggctccaccgacgcgatcgcggaactggtggcgacccctcccaacgggaccgcagtcaagccgttgcgagttgctggcgcctttcacaccaagtacatgacgcctgcgcaggacgctttcgcccaagctgctcaagacgtcaccttctccgacccgcagcacccgatcatctccaacctcgacgggcaggagatccggtccggcaatgacctgcgtgaacggctgattgcccaggtgaccgcgccagttcgatgggatctctgcatccagcagatcgcggatcgtcagccggaactcgccctatcggcccctccggggaaggtgcaggcgtcgctcttgtctcggcagatcccggacctcgcgacggtctgcatcaccacaccacgggaggcagcccaggctgcacagcggatcgaccagtccgtatccgtccttcagggggcatgatgctcatccccgagtacttcctcacagcctgttcggaccatgctgagcgcctggcgatcatcacccacaatgacgttgtgacgtgggccgaactggcgactcgcgtcgacggttttcggcgctggctgcgggaccatggcgtgcaccgccaggacagggtcgttctccagacgccaagcaccgtaggcacggtagccctcatgtgggcctgcctgctcgacggcgtgacgatggtcccggtgcaccaggacctcactgcctcccaggtgcagcaagtcatcgacgactgccgtccagctctggtgtgtggcagcccggacctcgtccaactcctcaactcccccggaatgaagacaagcacacctccaacgcggccggagtcaacgagtattctgccgtccttgtcccgggtcagccccgatgaccttgcgatgctcatctatacgtccggcacgacgggtctcccgaaggggatcatgtgtccccaccggcaggtcgccaccgccgcacggatcgtccatgactgtctcgggtaccgcacggacgacgtcattctctgtcgcctgccgttgtccttcgactacgggctctatcagattctgatgtctgccatctccggtagcgcggttgtcctgcgggacggaggcgcgcaggaccgcaacctggtgcgcgacatcgcccgtcacggcgtcactgtcgttccagtcgtgccgtccatggcgtcaatgctcatcaccctgcagcgtcgtgatcagttgccgaccatcgtcagactgttcacgaataccggggcgcgtctggcacccgagaccgcgaaccagttgctcgcaagcttccccggctcccgctatgcgtcgatgtatggcatgacggagtgcaagcgcatctccatccttccggtggaggagtacgagacgcatccggacagcgtgggaagagctctgcccagcactcacgtcgagatcgttgacgctcagggagttccggttccggcgggcgagcacggggagatcacggtgtccggcccgaccgtgatgaacggctactggcaggtgccgaacagtcccagtggacgattccgacccagcggccacggcctcactctgttcaccggtgatcgcggctggatggatgaggagggacgtctctacctcctcgggcgcgacgacgagatcgtcaagcatcacggcatccgaatcagcctgcaggagatcgagatagccgccgaagccgcgccgggcgtcgacgcagtcatcgctctcaagccggcctccgactcggcccccattgaaatcgcctactgcggcagcacgagtcccgagaacctggcccgccatctcgaaaccgtcctggaccgggcgcgacgaccccaattcatccaccaactccagcagatccccctgacccgtaacgggaaaccaaaccggtcagcagccgccgaggccatccgctcaagggcgtgacggcgaaggccaacacccacagacgaaaggaaaccaccatgacccaggccgagttcaaccagttcatcgagtccacctgctccgcgacgatcgtggatcccgaccgtcctttggtcgatcagggcatcgactccctcggaatgctcaccctcatggtcgctatcgaggacagcctcggcatcgaactggatcccgagtccctcgccgacggtaggggttccacgccctccggtcttctgtcccttgtcgagcagccgaaagcgacggtgtgacgacatgacgacgatggttccttgccgccgtgtggagatgccgcaactgttcgaccacatccccggaagcatctctctctcaggagggctgcccgatctgagcgtgctcccgagcaatcagatcgccgaactgacgtcccggatcatgcgtctcggctcaagaatcctcctgcaatactccaccccttcggtctcgtcctccttggtgccggccatcctggacctggcggaacgaacatgcatgtcaccggatccgcggaatctgatcccgaccgcgggttcccaactgggcctggccatggtgatcaatgcctttgacggcgatgagatcatctgtgactgcgccacctatcccggggcgctggccgccttcgcctctgccggcgtggaaacaacgggggtggccagtgacgaggaggggctcaacccagacgcgctcgctcacgccgtcgcagagggtcgggccaatggccgccgcatcgcagccgtctacaccacgcccaccttccagaatcccaccggctccgtacagtccgagaaccgccgtgcggccctgctcaaggtgtgtgctgacaatgacctcctcctcatcgaggacgatccgtacggcatgctgtccttcgacgggcagacgtggccagctctgaagtccatggacccacagcgcgtcatctacctgggcaccttctcgaaggtgttcgcaccgggcgtccgttccggctggatcgatccgcccgccaatcttgtcgagaaactccgcgctgtgtgcgagatcatgacactctcgccatcagccctcaaccaagcgatcatcggcgagtaccaccgtcgtcacggatgggacgaactgttggagggctatcgcgcctcctaccgcgaccgagcccgtctcctcatcggggctctcgaggctgaactggcaagaacgaattgcactggcacgtggacctggcgtgaaccacggggcggcttctacctgtggttggagaacgtcgccagcaccagcggtatcgacgttgcgcgtcgcgccgccgacaacggagtggccgtggtgcccgggaaacacttcgacgcagccggacacgattcgccgagcctgcgggtgtcgttcagcaattcacgcccggctgatctggtcgaaggagctcgtcgtctcgcccgtgcactggtgggagaggacgttcagaaatgactctcgcgacacgcaccgccaccgacaccctgcagcagaccttgccctggggcacccacgaacgtctcgtcttcgggcgggcgctcctgcgcagcaccggcttcccagccgaaggcttggccctgctcgactccgacgacatcctccccctcctcgactcctttcttgccggggacatcgacagaactcacttcgagaaggaatacaccagtcgcgaggagtccggcgcaagggcgctcatcaacgtcttgaaggacgatgcagtatcgcgcgccatcgcatggcagaaccccaccgcgtggaggtccttcgaatccctgtcgtccacgagcggaatcaatgcttcgactcggcgcaaggtacgccaactcgccctctactggcaacgttactgttccaaggctgagaccattggatacttcggcccgttcgcctgggccgaagtcgacccggaggcctctgcggtcgaattcatctcctccgaccatctgatcgaccgttcccacgtcgcaatggaggcgtgggcggtcattgagatcgggaaagccctggcatcacgggccgaccttcagtggtggatgccaccaatcctgtcccccgccgtcgacctcaacatggagagaggcaccgtgacggtggctggacaccagccacgacgggtccgggaggacgaggcacgagttctcttcctgaccgacggcacccgtcccgccgcccagatcgccaagagcctcgacatggagcccgagcggttgcgcaggatcctcgtggcccatgaacgtcgtcacaccgtgatctgggacgccaacatccctgtctcagtgcacgcgtgggacatcctgcacgaacgcattgcccagatcggagacgctgggctgcgagatgaggccactgctgttctcacgaggttcgacgagcttctggaggtcatccgcaacattcccgacgcccggtccctgacggaggcgacggaatccctgtcccgtcttttcgaaaccgtgacaggaacctcttcgaacagacgtgcgggccaggcatatgcagcccgcagcctgtgctacctggactgcacccgcgccggaaccgccaaggttgggacccggcttctcgaagccctcgacgcccccctcaacctcgtcctacaatccgctgactggttcgcggcgaccttggcaaaggaatacaccaccgaaatcacggacctcgcaaatcgaaagcagcgggcctcccaccagccactgaccatggctgatgtctggccgtccacgatgtcgctgttctggggggactcaccgtccccactgcagcgagccgtgaccgaactgtcacggcggtggagcagagtcctcgaggggctgcagccagtcgacggtcgcatcgacacgacatcgtccgctctctcgggcgccgtggacgagcagttccccgtgtgcaccccgattccagaactgtcagtgcacagcccggacctccaggtcatcacctcgagcactagcaacatcgcctccggacgagtcactgcagtcatgggtgagctacatgcctgtctgagcagtctcgacatgccgttgctcgagtggtcgctgccccatggttccattcgcgatcgcatcaacaccgcgctcaacctgcgacgtctggttcccttgttccccgagacatggaggcgcaacaccggccgcatggttccagcgacggtcggagtgggggatcgcgcaatcgggttcactcggacggccgatcaagaccgtgcgaacacatggtcgatgtcggcactgctgttcgagcagaccgaggacggactcatgatccgtgatcccgatggcaggctctggaccatcgcacaagcgtggagcgtgcccatctccatggtcgccgccgatgcgttcaagatcgggctgcccggctcaccagcccctcggctcaccattgacaatctcgtcgtgttccgtcgtacctggaggtttcccgctggctccatcgacatcatgcacggttcagccgccgagaaacacgctcggctgagggagtggcaggtcacgaatcaccttcctgaccacctcttcgtcaagttcccctccgaacccaagccgatctacttctccttcgagtcccccgccatggccacggtcttcacgcgatcactgcagcgcgacgcccgagagaatccagacagtctcgtgacgatgtccgaagcactgcccgagcctcaatcctcatggctgcacgacacccggagccaccactacgtccacgaattccggctgcaactgaccaaggagcgacatgacgaccacagttgagacacatcccgaaacacgtggcacaaccgcgacatccatctccaatctgatcggtcacacccctctcgtaagaatggaccatctgttcgacggcctccccttcgaggtgtacggcaagctcgagaagctcaatcctggcggaagcatcaaggatcgagcagcacaatccatgatcgaacgggcaattcgacggggtgagatcgtcccgggccgtacgaccgtcatcgagtccagttcgggaaatctcggcatcgccgtggcgatactgtgccaggagcacggcctgaatttcatctgcgtaaccgatgccaaggccacgccaacgaacattcgactcatcgaagcgttcggggccactgttgaggtgatcgaagaacctcatcccgagagtggcgaattcctccccatgaggctcaagagggtaagagaactgctgtcagagattccagatgcatggtggccgaatcagtacgggaaccccgacaatccggcggctcacgagcggactgtccgcgagatcatcgaggcaatcccgcgggttgacacgattgtctgcgcgaccggctcgtgcggaacccttcgcggctgccacgaagcattgcgaaagctgtccccacgcacccgactcgtcgccgtggacgccaagggcagcgccatcttcgacgaggcaggagcaccccatccccgctgtgtcccgggacacggtgcgtcagtgcgaccgccgctgtggcgcgcggggctcgccgaccaactggttctggtctccgacgcggactgcgtcgtgggatgccaggaggccctgcgcaccgaggctcttctcctcggcggatcctcgggagcaattctgacggccattcaccgagtgtctcccacgattcccgctggttccaccgtggtgacgatcctccccgacggcggcgagcgctacatcgacaccatctacagccgctcgtgggtcgactcacacatccccgggctgccctctctcgccgactggggggctcccaaccccgccaattcgtatgacctgaacagaagtgcctcatgaagctctacaccagagagaccgtcgaaactgcgcttgtcgggcgtcatggccaggttctcagtgccgtacagagtgcatacatgctgcattcgacgggagagacatcgctgccattctcaaccttcctccgcccggccgggtatccgaacgatcggatcatcgcacttcccgcccacatcggaggcgacttcgacatagccggtatcaagtggatctcatccttcccggaaaacctcgaccggggccagcaacgagcttcctccgtactcatcctcaatagtctggagacgggatacccgaccgccctgctggagtccagtcagatttcagcaacgcgaacggcagcatcagccgccctggccagcgccaccctccatggctccgaagaccatgtcagcacgattggcatcatcggctgcggaacaatcaatcttgcaacgatcgactacctcttccacgtgcacccccagatcaacgaggtcctctccttcgatctgaggcgggagcgggcccatgagttctcgcacctcgtcaaggcttcgcacccagaggcccgggtccgtgtcgccaaggagcccgacgagattctggccgcaagcaacaccatcgcgatcgccacgaccgactcgagtcattggttggaccttccgccgtggcacgggccggggcaccaagtcgtcctgcacacgtcgctgcgagacctgtcagtgccctcgatcctggcagcggccaacgtcgttgacgatcctgatcacgtctgccgtgaagcgacgtccttggatctggcaactcagcagaccggcaaccgggacttcatcacggggagaatcggagacctccttcttggcgcgccgctgtcctcaagtcctgactcccgtgtcattttctcacccttcgggctcggcatcctcgacctcgcagtcgcctccgtcgtcattgctgccgcctcctcttcagcagtcgagatcaatgggttcgaccccgggaaacacgccacaagcatgattgaggtgaatcgatgaccaccacacagatcaacgacaacacggccgttctgcgcgacgtattccccgccggctccgtcgcattcgtgagcggtgcctcacgcggaattggcgctgcctgcgcgacagcccttgcggccgcgggatgcaacctcgccatcacttatcgaaggaaggagaacgaggcggcacaaatcgccgaatccattgaagccatcgggcgccagtgcatcacaatgcagatggacgtaaccgatgagaaccaagtgaccagagccttccgcatcattcgccagcattacggacgcctggacgccgcggtcttgaactcgggaatcaccagtgacgggcatcttgcaacaatgagccgctccaagtggagctcggtgatcgacacgaatctgaccggaaccttcctctgcacgcgcgaggcgaccaaggccatgtactcgtccggtggctcgatcgtcatggtcgcgtccaccagtggagttgcagggcgaccgggccaggccaactacgcagccagcaagggcggaatcgttgccatgatgaagacgctggccccggaggttgcggcaaagaacgtccgggtgaatgcggtggcacccggcttcattcagaccgacatggtggcggccgttccaaaagcggcactcgcccaggcaatccaacacatccccatgggccgtcttggcctggcacaggaggttgcgtcagccgttaccttcctggcctccccgctcgccgcctacatcacagggaagaccctcactatcgatggcggaatgatcaacggctgaccccaggacccgcacacccccagtaccgagaaagaaacaacaatgaccgagatcacccacactgccaacagcatccgaacccgcgccgaggaacgttccaacaaagcttggcgcctgaaggaggagatcatctccaagctcggtctcgagaccaagccagaatatgtctcggacaaccaaccgctcttcggacgtggccttgagatggattcccttgacactctcgaagtcgtcgtcgccgtcaacaatgagttcggagtctcggtcaacgacgacgacgtacaggcgttcggctcgatcaatgccatggtcgatttcatcgaggtgaacgagaagtgagttctcttgcgctcgaggcgccacccaaggacgcccgtaagaaattcgcctacgacagcgatgccatcaagacgatgctcccacatcgttggccgatgctcatgattgatcgcgcctacgacgtcgtcccagggaaatcgggcaaaggcatcaagtcggtcagcgtcaatgagccgttcttcgccggtcactaccctgaccattccatcatgcccggcgtcatgatcgtcgagtcgatggctcaactcgtggccgtcatctacgtagccgaggccattcagaacaatcccggcatgacgtcgcacgacgcacgttcaagcgttggttatctcggcgcgatccgtcagatgaagttccgacgcctcgtcactccgggcgaccaactcaccctccacgcccagctcggcgagaaagtgggggctctgcgcgaggtttccgtgagagcactcaatggccgggatgtcgtcgcccagggggaactcgtcgtcaccgagcggtgacacccagccacacacgagaaggaagtcccatgatcgttcgcccctacaggccacgtgatgcggaagcgatcgtacatctctacaacagccattccgactcccccaatccagtgtcgggagggattgttgaggaggagttccagagggagctcgaagaacgtggttcgacagtgttcctagtggccgaggaggccggatccattgtcggcacattcgggatgttccgcacgaatggccgacacaccatggccgatgatgaagtcttcgccgacatgttctatgtcaccccgtcacatcgactctcgacagttccgggacagctaatcactgaagccatcagcgagtgcttcatccagggcatcaacgtgatccgcctcaccgtgaaccccgcgaacatctccgcgctcaaggtttacagaaaagtcggttgtgcctgtctcggggccaccgatgcaggcgaggacgggaacattgagctgtacaacttcatccctctggttcttagggcaaccatcaccaaactcgaccacgattgtattcgagccctggcggacatgacttcgttcgcctgcatcaccgagggacgtccacttgatctgtcccacgacttcatcgtggacgctggacggaagatcgtctcccacagcatccagatcgggcgttcaaccatccacgccatggtcgacacgggctcgaggaccattgtggaggccaccctcgacaaccgcgactgggatgctcctcgccagatcgtcgcccccaccccctgtcagaaccggcccgaggaacagcgaggcaaccctgtccggctggtgcacaagaagcttgaggtcaccttcaacgaaggagtcattgagatcagtacgactggccactggggcccggtcctcgcaatgtcctggccctcctccgtctcgcaccgcgctcacgggtggcgacagggccccgccaagtcgtatcgatgcgagcttctcgagaattgcctcgtcctggatgacgaaggaggagtgaaatgcaccatcagcctcaatgattgccaagtcgcgatccggatggatggtgccccaaaaacggaattgagaatgtaccagtggtgcagcctgcgccagggctatctgacggctgacaccggcatcacgagcttcaaccgggcatccagtgggctcggagtcgccgtccgggactcgtccgagattgtcgccgcgggccttcccgtcatccctgacacaccgatcacatggagtgagggtgacatcacggttcagctcgatccctgcggccgcgcctccctgatccactcgaccctggtggaccgaagaatccacttggacgagtctggctcggcaagtctcaccatgaccgtgtttggtgattcccagccccatcgtgccgacaccgtcgagctgcctcccctcgcggcaggcaccgacaggatcgtcctcaagccggctgccggaggcgtgaccacatggcgcttgggcgccaccaaggtgctcaagtcaccgtggccacacgcccgcgcgctcgggcccaatccgatctggcgagccggcctgtgggtcagtcacgagccggatcgccacgaccgtcgccaaggaatggggtggggtcccgatcatcgcagttggaccctgtcggaagacaccatgaccagtactgacgggacactctcctggcgcttcagcggctcccccgacaccggctggacggtcgacgtcacgacgagcaacacgcacggggagaccgtcgtctggctcaccccggactgcccggcgggcgagaggatccgcacgtctgatcatgccgtgacgaccatgcttgacatctcgaagccatggcagcgctggaccacccgatgcgcaattcctctcagacacgggaagtggttcctcatcgagcctgatcatgacctcactgattcccccgaaatcctcatgcgctctgttcacggggtcctgctcgtcggctgtgtcggacgagcccactccggatccgcttcctggcgctttgccatcacgtcagaactccccacctccaacccaagaagaaacgactacacctcagccgcctgaacccaaccagttggaacacccactacagaagaaatggagcaccaccatgtccatcactgagcagtacaagacccttcgcacctcggtcggcctccacacgcctaccggtcccctggtccgtatcaccggtgatgatcgtctcgagtttctcgacaccttcctgtcccgcgcctcggacttcgtggaccccgacaccactcgggagtgcctcgctctcaccgaggacggccttccgctgacgatcttcctccacatcgagcgcgaggaggagtcatggctccttccccgcaccgccatcgatgcggcgaccctcgccacgtacctcggcaacctcgagaccgatggtgacctgtcaatcgagattgctccagagggttggggagctgtcgctgtcgaggggccgctgtcgtggcagatcgccgaaaaccttctcgacttcgacgtggctggcctcgttcttcacgccgtcacggacgtcgtcgttcccggggcccccgagggatcgaaggcatggctcgcccgggtcggaaccactggagagtacggctacctgctcgtctccaacgttcccgacctcgcccgcacttatctcctcagccgcgccacggagctgggcggtcaggcagtcgacgccgatgctctcgcacgagtccaggccgaggccgggatgccctattacgcgatgggcgtgtgccacctcgatgtcgccgggggtgacctcgcctggctcgtggactggcagcgcatcggcgagttccaaggatccgagaatctgcccacacccgtccgagaccagcgccgactggccgccatcgccctgcccaccggcaaccgcccggaagctggtcagaccgtcgctgccggggatgaggagattggaatggtggtgtacgtcaccccgtccgccaatcccgatgaggaactcgcgttcgcacttctggatgctcctttctggactcccacccttccgttgaccgtcggtgcccacgacgggaccacggtcaccctgccccgcgtcgtggcagcctccagcctcaacaagctggggtgacagcgatgacgatcactgctgagaacgccaccacccgcagcgacattgcccggagcattgcggtgaccggcgtgggactggtcacggcacagggtgaccataccgacgagtgctggaccgaacttgtcgatggggtttgcggaatcaccatgaacgtcacgttcgatgactctggcaccacgattccgtgtgctggcgtggctcccattccgaactctgattcgatcgaccgctgttacctgctcggcgtccatgccatgcgtgaagctctcgagatgagtggcatcgacctggactccgtgggtcgtgatcgcatcggactcgtggtgggctcaagcctcggcgcgatgcccaccttggaggcggctcatcgccgggccattgagaccggcgtgctcgatgccggattggcggcagactcccagctccactgcgtcgccgaccacctcgccgctgagttcgacatccgtggaccccgcgtcgtgacatcgaatgcgtgtgccgctggtgccgtggcgatcggctacgccgcagaactcctctggtccgacgatgtggacctggtcgtctgtggcggtgtcgatccactggcccagatctctgccaatgggttcacgtgcctgggagctctcgacaatctcccatgcagcccgatggccggttcctccggtctgactctgggcgagggagccgggttcatggtcctcgagagaacagatgcggcggctgccagaggccaggaggtgatggccgaaatcgccggctacggcacaagttgtgatggttaccaccagactgccccggacccgggtggcaatggcgcccgcagctcaatggaggccgccctgcgctcagctcatctcaagccgtccgacgtcagctacgtcaatctccacggcaccggtactccgaccaacgacgccgtcgagccgaaggcactccggtcattgttcaagtccgatgaccttccccctgtcagttcggtgaagggcgccatcggtcacactctcggcgctgctggcgccatcgaggccgtgtgctcgatcaaggccatccacgagggggtcctgccgccaaccgtcaacaaccgcgggcaggcttcccgaactggtctcgacatcgtgccggagtgcgcacgcaaggccgctcccgacgtggtcatctccaactccttcgccttcgggggcaacaacgcatcagtggtcatcaccgcacctcgaggaggcgttcactgtaccgccccggcgcagcttcgcgaggtcggaatctcaggaatggcagctctggcgggaaaggccgccaactcggaggagcttctttcggccctgtcagaagattgtccaatctggatggccgatgagaagacctgggaaggggatgctgtccaaaccggccatgtggacatcaagcgcctgtcccgcacaatcaacccgtccaaggttcgtcggatggaccccttgggaatcatctccagcgcggtggtgactgatctgtatgcccgacacgggaagctgagccgcaaggatgccgaaagcacgggaatcatcttcgcaaccggctacggtcctgtgacggcggtgacgcagttcaatgacgggatcatccgccacggttccgagggtgccaacgccctggtgttcccgaacaccgtggtcaacgcagccgcaggccacctcgcgatgctgaatcgctaccgtggttacacggccaccttggcatgcggtggaaccagttcactcatggcgctgcttctcgctgctcgcgtcgttggccgcggcgctgcggatcgcatcatggtcgttatcgctgacgagtttcccagcattgccgtccaggccgtcgcgaagcttcctggctaccgacacagggttgatggttccggagccgtgctctcggaaggcgcggtatgcgtcctggtggaggccgtcgaagtcgccgaagcacgcggtaccgcccccatggcgctgctacgcggcttcggatcccgtggagagtccgtgggagtcggtcacaccgcatccgatggacgggcttgggccaaggccatggccgctgcactgggcccggccggcctgactgcctccgacgtgtcgaccgtcgtggcggcatcaagcggacatcctcgcgtcgaccgagccgagcaggcggccaggcggatcgtcggactgtccgcaaccgctacgaccttcccaaaggcgattgtcggagaaacacacggatcggctgccgggatcgggctgttcggtgccctgtgcggttcgaggtcagccgcgcaccagaacatccttgtcaacgccttttcccacggcggtggttatgcctcgatggtggtggagtcactgtgaccacgacgcttctgccacgggttgcccagccgggaccgggcgtcagccatgtcgacaccgaccgtcccatcgagtgcatcatcacccaccacccccacatgccgcgtgatcgcggaggccacgccacctccgtgtcaggcaggtacttgctgcgccaagccgcagaactcatgctcggcacggatcctgcgcattgccccgtcgtcgacccttcgcggcgctggtactggcccggaatcaatcttcacggttctgtctcccatgtcccgggctggagcctgacgacgctgagcaccggcggccacatcggggcagacatccaggacttccgggagcgtcccggcgcaatggcattcatcggtgacctggtcaagctgtcgcgatcggcgtcactccgagaattcgcggagtgcgaggccgtcgtcaaggtgtccgaattgactaaggagacgttcgggcacgtgcgactgcccgaatggacacccggatggcgccacgttttcgaggactactgggtctggagtctcgagatgcacgggatgggagtcatcgcactcgcatccgatctcccccgagccattcgctggtggcggtgcgacgccgatgcccgtggccgtctccaggctctccgacccataagcagtcttggaccaggaaggccgtcatgagccggtactcacgtcgaatctcaggcatcgaacgcggctatctcaacgccgcaacccggggcccgcaccccaccatccacacgatgatcgacttcgagggccgcgtccccgccgactgttggcggcacgcatccacgattgcgtcggccgccaaccctggcatgacagtggtccggaggtcgggccgatggacatccgatccagcgggctgtccggttgtgttccacgactggaccgcggaccccaacgacgttgccgacttccacgctgacatggatctcgtgacgggaccatcgtccacgctccacgttttcgagggggcggaacgcacccgaatcaccttggcagcaagccatgccgtgaccgatgggcggggcatcgaacgatttctcgtcgacctgcttgcagcgttggacgagcgtgaacccattggaagccccgacaccctgaccgatgtcgatatcaaacgatccttggagaacagcatcaagccccgacgccacctggccgctgtgcccgccgatgtcctttctccactgggggggaggaagaaccaacgtatatgggcctccaggacgtggcacagtgccccgggagccatgagcggaagaatcgctgccgctgtggccgagatgatcgaccacgccgcaatgatcatcatcccggttgacatccggcggcacgtcccagaggtccgatccacagcaaacctaagtgcccaactgccagtgatcatcaccccgaaccagcgctggcaaagcatccatgggcatctgctcacggaccttgctcgccatcgagaccttgcgatcatcagtgaggatttccgccacaacaatccgttcgcatcgaccttggaggaaagccaggccatcggcctcgatggtgtctatccctgtgccgcaatcatctccgaccacgggaagctcgacctttcaaggttccagaccttggaactcaccccggtctcgatgcgaagcctcccgatgctcgttccctactccgcaatgttcatcagcagttgcaccgtcggcgagaccaccactgtcaccatcgctcatcgcgctgatgacgatcccgattccataaacaccttcttccaccacatcgaatcccagatgtccatctgagccacgtcgtccctggagagcaaacatgaccacccaaaatgtcatcaccccgccgcgccccgtcacctcccatgccacggcgaccaggtccgaggctccaccgcgaagcgtcatcagagccatggccatctcgatggtcgcgaccctcatggtcatgctcgacacgaccgtcgtgaacgtgtccttgagcgcgaccaccgcccgcttcgggagcatgggcagcgtgcagtgggtcctcacaagttacctacttgcactgtgcgcgacgatgacggcctccgcctgggtcatcgaccgccttggtccacggctcaccttcatcgcctcaatgaccatgttcctcatcggctcggtgatgtgtgcactgagcgattcagtgtggcaactcgtcactggcaggaccatctccggtgccggagctgggatccttgttccgacagcatccgtcctgcttatccgtggcatcccacgcgaacaacttggcagggtgcaggcactgaatgggagtgtccagttgatcgctcccctgatcggcccgactgtgggcggtctcctcgttgacaggtgcgggggctggccggccatctactgggcgaacgtccccgtagctcttgttcttctgattgaggccgtccgcgtcgatccggacgaaccacacaccgctaagcgccgcctcgatgctctcggcctggtctgtggcagcaccgcgatcgtgctgacagtgcttggtgtctcactcttcggcaggacgtcgcgaaacaccaccttcctgcttacgatcggcgcgcttgcagtcctcgcatgggcgttcttcatcacccacatccgaagggctaccaaccctctgcttgacgtttccctgtatcagaaccctgtctattcatggtccagcttcaacgtagcggtgcttggtttcggtctctacgcccccatggtcgtcatgcccctctatctcgaggcgacgcgccacctcactgccgtccacactggtctggtgatgtcagtggccggcgtcggcgtcattatggccggaatcctgtgcacgaagatcatgggccggatcggtggaggcctcacgatgacagttggcataactctgagcatcatcgccactctgcccctggtccggctgacgaaccacacctcctacatactcctggcagtctgcttggccttgcgtggagcaggaatcagcctgacaatcgtcccagccatgacacgggccttcgagtccatcaagaggacggccatggcggacgcctctgcacagctcaacctgttgcagcgaatcggcgggacaattgcgacagcagtcatcatcgcagttatccaccacgaggccatgctcacccgcggactctcccccacagtgttctcgcacgccaacgtgtggatcctcaccgcgaccgccgtcacccttctgccggccttcgcgcttgcgaaggccgaaagacaacagcaggatctctgagcaccgaggagtactccctcgtagaccctcctctgatctaattgggttcgttccaagtgtgtatctcactccggggagccccgattgctgaaccacatcccgttcaccctggcgagtccctcgtggtacgacgtcccctgggcgcccggatctccgtatctcacaggagatatctcggtcctgccagcggactcgccaaggtggacgacgaccatccggggtccttggcaaatccacatgccacctcgtccgacccttccagaggtggggtggaaagtgcatgtgtctgccaagccatcggaattggaatcggttgcctcagtcgtagcactgtggtgcgtacgccacagcgtccccttcaaagtacttcgcacccgaggtctcgttcacgcgagtcaagtcaagtatgcggaccgaagtcagagcggcaaggtctgcacctgctaccccgacggcgagagccttgagcacttctgctccggtcttgccgagctgcttcagaacgtcgattcacctccggtgtccggcgagctgcgagtcggatcctcccctctgtggttgcgtcacgggagtttccgagaggcatgggcggtgtcatccacaggagtaccgttcccggtctacccgggaacaacacatcctgatcgtcgaggccccgcgcccgcagaatccgatcacgacacgccgtggatccggaggctccgtcggacgaatcgccccagcacggttcttcccatcgacgatgtcagactcctccaccgatcaaatgctggcggcgtgtatcaggcaacatggagagacggcacatcggtagtcgtcaaggaggcccggcacctgtccggacttgatgcggcgggtgtcgacgcccgagtgcggctgcgtcacgagtacgaggccctgagaagactggacccctatcgggccgctccccatcccattgatctcattgagaccgaggacggctcgttcctgatcatggaattccttgacggaatgacagtccaccaggagatgtcgaggttccatcctctgattagtaggcgacctcatcggctatcgatgaccgatttttcacgctggtgccgagaggtcgaagatcgcttgaggaatgtcacgagggtcatggccgggtgcggaatcgttcacggggatcttcatcccgcgaatctgatacatgtcggccatgaggttttggttactgactttgaatcctgctcaatcgacggggtcgccgtctcgtcagggatcgccgctccctggttccagtcggacgacacgattcccgatccggcgacgactgacgatctccacactcttctcgtggatccgacttgcggccccgcgcttgtcccccatccaaatcttcgcgcgctcatcagccaggccgcagtcgaggacatgatgggaaatccgactggtttaccacatgcctggaacctcgaggacatgacaagcgaactcgccaaggggatccgggcatcagccactcccgcacgagccgaccgcctctttccctcagacccctacctgttcgggcatccaggttcagaattcggcctgatgcatggcgccgccggaatcatggctgctcttgccgtgactgggtacggtgttgacgcgaatcacgtgacctggatgaaggaccgcttggccacccgcccgaccctgctgccggggttggccaacggaatcgagggaattgccctgggtctctccctgtgcggtcagaacgacatggctgcatccctgctccaccagtccggaattctcacgatcacaacgaacggatcgactgacctcaccctcggtactggtatggcgggccgagcgtgcgcgctgcagtccctctcacaacgactgtcatcgaaatctctcgcccacgctgcatataccctctgggaacaactcgccgtggctatgcggaacactgatgtggccttgccgaacggcctgttctccggttgggagggaatcgggctctccctgcttgcctctcccctgccggatcgtcatgatctcgcccgccactcactccgactggccctggccacgacaacgattgttgacggtgcgctcttctcaggcgagggacagatccgatggccatatctggggcgtggtcccgcggcatgtggcccgctcgccgccaggcttgatgatgaccagacggccaaggccgtggcacagacctgtcgttgtcccctgactgagtcatccggtctccacaatggccgcgcaggtctcctactcgtcctccgccagctcgtgggagaccaagacgacgccgttcgccgccacctcatgagactgtcgtggtcgatggaccgtcgcgaggaaggcacattgctgctgggtgatcatggcctgcgtttctcatccgatctcgcgacggggtcagccggcgccctcctcgccctgagcagggacccatggcggaacatgacacgaatgctcggaatatgcgatgacacctgtcatggcccactagtgacagtttgatctagcgccgatagttcacaactgaaagactccaaacatcgaggaaaacatgctgagccaaaacgccttggcaggcgtggctcgtttcaccacgatgaacaccaggagacagaatgtccgttgaggccatgcaatccatcgagatggacgaggaaaacagcgccagccagacagtttgcgcttgttacagcttcttctcgtggtcaggatgctgcgtagtctcccaagcggtggaagcatcttgatcgtgtgagacaccgtcgactaccctgtcccccgtggtacgcacacgccccgtcctggacagtcccggaagaccgctcatcgcctccggagtcgtcctggcggtcctgctcatcatcgcggtgatgacgatggtgcttcagcgcgaccccactctcacccccggacgccgcattctcggtatcgtcctgtccacggtccaggccgtcggattcatgtggctgcagacccgcatggttcgtcacggcaagggttcgcgcaacatgcgtgcgacccttggaagggtcggtttctgggccacgtggggactcgtcgcagtgggagtcgtcaatctgtggctgaccaactcgtggaccctcttcggggcctccgtcgccacgcccctccttctcctgccaggggtgtggagtgtggtggccaccctcgtgaccctgatcgtcggtttctccgacctcgtggtcacccacacctcgccactgacctcagccacggtcgtgctggtgaccatcgcggtgtcggtgaacctctacgcattcacgaagctgtcgacggcactcgttgaactccgctcctcccaggaggagatcgcccggctgcgcgtggacgccgagcgtcaccggatatcgcgggacctccacgacatcatcggtcgcaccctggtcgccacgtcgatgcgccagcaggcggccctccacctcgtcgaccgcgacccgcaacgggccaaggaacagctcgacgccgcccatgacgcaatcaccgaggggcagcaccagttgcgttccatcatccaggccgagatgagcaccagcctccccgacgagatcagcgacgccacattcctgtgcgaccgactccacatcgacttccgcatggatgaccgcggcagaccgcacaaacccttcgactcggcggcggcggcggccctgcgcgagggaatcacgaacatgctcaagcacagcgcggcgggctactgccacgtcgccatctccccggacctcctgaccgtcaccaacgacggttgtccgcaatcacctcgcccctccaccacaccgggcaccggaatcgaccatctccggtcccagatcgaggcgctcggtgggtcggtgacgacgtcgcggccctcgcggggcaccttccggctccgctgctccttcccgacccggggggcgtccacgaccacacccgcgaccgaaggaggacgatgacgacgagaatcctcctcgccgaggacatcaaactggtggcagaggccttcgaggcactgctctcggtggaaccggagttcgaggtcgtcgcacgggtggcacgcggcgacgacctggtcacatccgccacccgcctgttccccgacgtgatcctggccgacatcgacatgcccgggatgaccggcatcgaggccacccgaatgcttcgcgacaagggataccgcggcagaatcatcctgctcaccgccctgccgggaagcgggcacctgcacgccgcgatggctgccggagccgacgggtacctgctcaagtcgatcaccgcgccctccctcatcaacgccatccgggcggtgtgcaacggccagtcggccatcgacccgaacgtcgccgcggtcgccatgcgcaagggaccctcgcccctcaacgaccgggaaaccgagattctgcgcctagtcgccgacggttcctccaccgcgcagatcgcctcgcggctgtacctcagcaagggcaccgtcaggaactacctgtcgacggcgatgtcgaagctcgacgccgactcacgcacagcggcggtcacgcgggcacgcgaggagggctggctgtagcaggcgacccgctcagcccaccgcccctcagcccgccgactcctgacgcacggcctcctcgaccgcccggctgagcagggacccggccctgaccatcgacgtctccgggtccggctcgagatcggacaacgcgatgatccggtcgaacgcggaccgtttctcctcgggcaggtcacagcgtccgcacaccgcccagacgggcaccccggcgtcccgggcgatcttgcggatggtgtcgggaagcttgccgagcagggtctgctggtccagccgcccctcccccgtgacgacgagactggaggcggagatccgcgacaccgcgcgggaccatcccaggacgaccgccgcgcccgggcggtacctggtccccaggcacatcagcgcccagccgacccggctgggcggctgcgaaccccctggccaccgcccggcaggcctttcccgaactcagcgaccccttgaaggagtcgacggcaacgatgaccggcgcattcggatcaggacgcatgggatcagcatgtcacgtcgatacggagcagtcgcgccgcctacccctagactcgggggcatggtcaaccgagtctacctgtccctgagcgttctcgccctcgtgctgtgggtggtcgcctaccgtcacatgccgggctgggccgcgggcatcaccctggtgggcatcgtcgtgctgtcgctgtggtgcgagtggtcgcgggtgcgcaccctggccaggatcggcaagtcccgccagcagggcccccgctcctcccgaggacgcaacctgtcgtgagcaatacgattcccgcagccctccaccccggccctgacgaggcc

SEQ ID NO: 426 - DNA, 26620 bp, Propionibacterium acnes
  source 1..26620: mol_type = genomic DNA
ccttgtggacaccacgtcatccacatgacttgtgtcacatgattcccggaccatcatcaagcagatgctcacccaactgtaatgatttctgttctgaatctggacatgctctgacctgcattcaatgatcaattccgtgcgatattccacaacgcacggggaggtcgcagacaatgacaacagaaagcatccccacgcggctgctcgtgtggcacgagcagaccgatccgaccaagctcctcaggatcaccgacgcgatcaggaggggggatccccttccccccatcgaggccatggcgatcggccacagattcctcgtcctcgacggtgcgcaccgggcccaagcccaccagtactgccatcgatctgagatccgagcccgcctccacaacctccccctcagcgcggaaataccaggctggagccactccataccccgcgatgcagcagcgaaactggctcacctactcctccccgtggacgctctcggtcaggcggaaatcgtcctgcacggggtgcgccgtcaggtggggaccgcttcacaacgaccgcgcgacatctttctcgcctgccaccggatcgcgcgagttgcctacgcgcatggaatcagacctctcggcccggagttctccaacgctccgacgatcgacgccgccaccatgacctggcgcccgccgaacgtgggcacgttgtgggccatcgccagcagtctcggacccctgcccgcaactgtgacccggttcgccccgatcctccggcacgacgccatcggggattccgcgatgacacccgtcacctccgccgcgtgacgacccgcgccaattccgccccaccactggatgaggggcagccgcgtggacgatgctcctgttcaggcagggactccatacgagaccaataggaaaatcatgatcaaaaacacaagccctctgaccgtgaaaaatgtctcgaaaacattccgtggctccagcggagaagccatcaaggccgtgcaagacgtgtcattcaccgttgagcgtggtgaggttgtggcattcctcggcccgaacggcgccgggaagtccaccaccatcgacatggctctcggcctcacccgccccgacagcggccagatcgaggtcttcggtactgacccgctcagcgcggcccggtcgggacgctgcaccgcgatgacacagaccggcgggttgctgcccgacctcacgattgggcagaccatggagatcatctcctcgctctatcgtggctcccacatgaatgcctgcatggagcgagcaaggatcacgcatctggccgatcggcaggtgtcgatgtgctcgggaggcgagcgccaacgacttcgcttcgcactggctctgctgcccgatcctgacttcctcatcctcgacgagcccactgcggggatggatgtggaggcgcgccgggacttctgggcagagatccacgaggacacgcgtcgtggtcggacaattctgttcgcaacgcactacctcgacgaggtggacgagttcgccgatcgggtcatcctcatcaaggagggccgcgtcatcgccgacgacacctccgacgcgatccgcaccatgtcggggggttgcaccgttacggcgaccattcccgacttctccctggcacgactgaatctgccgggcacccaactcatcaagcagggcggcgcacgcgttgatctgcaccatcccgattccgatgccctcgcagcgcgagtcatccagctcggcggcaccgacctgcgcgtggtcccccgcagcctcgacgacgccttcctcgctctcacctcaaccaccaaggagtcctgacatgaccgcccaagcgcttcccgcagtcgccactcccaaggcccgccaccgatccgccatctcgctgaagtacttgtggtgcgagatgcgtcgccccttccggcgttcgacgatgctgttcaacctcgccctccccgcagttctgtacctggccctgttccgcaccgtccacaccgccgagctgccggacgggaacttcgcgatgtggatgatgatcggcatcgctgtctacggagcggccactgcgagcaccagctacgcagcctccatctccgtcgacgaggccaacgggtggacccgcaccatccgcctgacgccgttgtcgtcggtcgggtacgtgctggtgaaggtcctctgcgccatggccatcgccctggccccgaccctgctcatcggtctcatcgggctgttgaccggagctcacggcacgctgcgggtctgggtaatcggactgggggcggcttggctcagctcagcaatcttctccgccttcggcctggctctcggactgtccctgcgtcccgaggtcgtcatgcacgtccccggcctggtcatcaccggtctggcgttcctgggcaacgtcttcgtccccctcagcgggacgatgctcaccattggccgctggagccccgcctacggcatcaccgcgctggctcgttacccgctcaccaacggcatcgacatcgggggcggccacgactccctgacggctgccctcatcggcaccttctgctggttcgccggattcgtgttctgggcctcccgtcgatttaccaagagcacgggtcgtcagtgacagattcggccgatctccggaaggagcagtgttatgaccaagcccctcattgcagtggtcaccgcgggccaaggagcgcagaagcctcgcctgctcacgccatggctcaaggtccccggcgtcacggagaagcttgctgcatggtccgctcaggccgatgtggacctcgtcgagctcggtaccagggcgaatgcagaaaccttggcagcgaccgagaatgcgcagccactactggtctgtctcggagtcctcgtctcggatctcctggccgaccagaacattgtgctcgcaggacactccgtgggcgagctgacagcagcgtgtctcgccggggtagttgatcccgggacggccgtcactcttgcacgacggcgtggactggccatggcgcgggcctgcgctctccacccgaccaccatggcggccatcattggtgacaatccggatgacgtcctccggcggctctcggaactgggactcacggctgccaacatcaacggaggcggacagattgttgcggccggctccaccgacgcgatcgcggaactggtggcgacccctcccaacgggaccgcagtcaagccgttgcgagttgctggcgcctttcacaccaagtacatgacgcctgcgcaggacgctttcgcccaagctgctcaagacgtcaccttctccgacccgcagcacccgatcatctccaacctcgacgggcaggagatccggtccggcaatgacctgcgtgaacggctgattgcccaggtgaccgcgccagttcgatgggatctctgcatccagcagatcgcggatcgtcagccggaactcgccctatcggcccctccggggaaggtgcaggcgtcgctcttgtctcggcagatcccggacctcgcgacggtctgcatcaccacaccacgggaggcagcccaggctgcacagcggatcgaccagtccgtatccgtccttcagggggcatgatgctcatccccgagtacttcctcacagcctgttcggaccatgctgagcgcctggcgatcatcacccacaatgacgttgtgacgtgggccgaactggcgactcgcgtcgacggttttcggcgctggctgcgggaccatggcgtgcaccgccaggacagggtcgttctccagacgccaagcaccgtaggcacggtagccctcatgtgggcctgcctgctcgacggcgtgacgatggtcccggtgcaccaggacctcactgcctcccaggtgcagcaagtcatcgacgactgccgtccagctctggtgtgtggcagcccggacctcgtccaactcctcaactcccccggaatgaagacaagcacacctccaacgcggccggagtcaacgagtattctgccgtccttgtcccgggtcagccccgatgaccttgcgatgctcatctatacgtccggcacgacgggtctcccgaaggggatcatgtgtccccaccggcaggtcgccaccgccgcacggatcgtccatgactgtctcgggtaccgcacggacgacgtcattctctgtcgcctgccgttgtccttcgactacgggctctatcagattctgatgtctgccatctccggtagcgcggttgtcctgcgggacggaggcgcgcaggaccgcaacctggtgcgcgacatcgcccgtcacggcgtcactgtcgttccagtcgtgccgtccatggcgtcaatgctcatcaccctgcagcgtcgtgatcagttgccgaccatcgtcagactgttcacgaataccggggcgcgtctggcacccgagaccgcgaaccagttgctcgcaagcttccccggctcccgctatgcgtcgatgtatggcatgacggagtgcaagcgcatctccatccttccggtggaggagtacgagacgcatccggacagcgtgggaagagctctgcccagcactcacgtcgagatcgttgacgctcagggagttccggttccggcgggcgagcacggggagatcacggtgtccggcccgaccgtgatgaacggctactggcaggtgccgaacagtcccagtggacgattccgacccagcggccacggcctcactctgttcaccggtgatcgcggctggatggatgaggagggacgtctctacctcctcgggcgcgacgacgagatcgtcaagcatcacggcatccgaatcagcctgcaggagatcgagatagccgccgaagccgcgccgggcgtcgacgcagtcatcgctctcaagccggcctccgactcggcccccattgaaatcgcctactgcggcagcacgagtcccgagaacctggcccgccatctcgaaaccgtcctggaccgggcgcgacgaccccaattcatccaccaactccagcagatccccctgacccgtaacgggaaaccaaaccggtcagcagccgccgaggccatccgctcaagggcgtgacggcgaaggccaacacccacagacgaaaggaaaccaccatgacccaggccgagttcaaccagttcatcgagtccacctgctccgcgacgatcgtggatcccgaccgtcctttggtcgatcagggcatcgactccctcggaatgctcaccctcatggtcgctatcgaggacagcctcggcatcgaactggatcccgagtccctcgccgacggtaggggttccacgccctccggtcttctgtcccttgtcgagcagccgaaagcgacggtgtgacgacatgacgacgatggttccttgccgccgtgtggagatgccgcaactgttcgaccacatccccggaagcatctctctctcaggagggctgcccgatctgagcgtgctcccgagcaatcagatcgccgaactgacgtcccggatcatgcgtctcggctcaagaatcctcctgcaatactccaccccttcggtctcgtcctccttggtgccggccatcctggacctggcggaacgaacatgcatgtcaccggatccgcggaatctgatcccgaccgcgggttcccaactgggcctggccatggtgatcaatgcctttgacggcgatgagatcatctgtgactgcgccacctatcccggggcgctggccgccttcgcctctgccggcgtggaaacaacgggggtggccagtgacgaggaggggctcaacccagacgcgctcgctcacgccgtcgcagagggtcgggccaatggccgccgcatcgcagccgtctacaccacgcccaccttccagaatcccaccggctccgtacagtccgagaaccgccgtgcggccctgctcaaggtgtgtgctgacaatgacctcctcctcatcgaggacgatccgtacggcatgctgtccttcgacgggcagacgtggccagctctgaagtccatggacccacagcgcgtcatctacctgggcaccttctcgaaggtgttcgcaccgggcgtccgttccggctggatcgatccgcccgccaatcttgtcgagaaactccgcgctgtgtgcgagatcatgacactctcgccatcagccctcaaccaagcgatcatcggcgagtaccaccgtcgtcacggatgggacgaactgttggagggctatcgcgcctcctaccgcgaccgagcccgtctcctcatcggggctctcgaggctgaactggcaagaacgaattgcactggcacgtggacctggcgtgaaccacggggcggcttctacctgtggttggagaacgtcgccagcaccagcggtatcgacgttgcgcgtcgcgccgccgacaacggagtggccgtggtgcccgggaaacacttcgacgcagccggacacgattcgccgagcctgcgggtgtcgttcagcaattcacgcccggctgatctggtcgaaggagctcgtcgtctcgcccgtgcactggtgggagaggacgttcagaaatgactctcgcgacacgcaccgccaccgacaccctgcagcagaccttgccctggggcacccacgaacgtctcgtcttcgggcgggcgctcctgcgcagcaccggcttcccagccgaaggcttggccctgctcgactccgacgacatcctccccctcctcgactcctttcttgccggggacatcgacagaactcacttcgagaaggaatacaccagtcgcgaggagtccggcgcaagggcgctcatcaacgtcttgaaggacgatgcagtatcgcgcgccatcgcatggcagaaccccaccgcgtggaggtccttcgaatccctgtcgtccacgagcggaatcaatgcttcgactcggcgcaaggtacgccaactcgccctctactggcaacgttactgttccaaggctgagaccattggatacttcggcccgttcgcctgggccgaagtcgacccggaggcctctgcggtcgaattcatctcctccgaccatctgatcgaccgttcccacgtcgcaatggaggcgtgggcggtcattgagatcgggaaagccctggcatcacgggccgaccttcagtggtggatgccaccaatcctgtcccccgccgtcgacctcaacatggagagaggcaccgtgacggtggctggacaccagccacgacgggtccgggaggacgaggcacgagttctcttcctgaccgacggcacccgtcccgccgcccagatcgccaagagcctcgacatggagcccgagcggttgcgcaggatcctcgtggcccatgaacgtcgtcacaccgtgatctgggacgccaacatccctgtctcagtgcacgcgtgggacatcctgcacgaacgcattgcccagatcggagacgctgggctgcgagatgaggccactgctgttctcacgaggttcgacgagcttctggaggtcatccgcaacattcccgacgcccggtccctgacggaggcgacggaatccctgtcccgtcttttcgaaaccgtgacaggaacctcttcgaacagacgtgcgggccaggcatatgcagcccgcagcctgtgctacctggactgcacccgcgccggaaccgccaaggttgggacccggcttctcgaagccctcgacgcccccctcaacctcgtcctacaatccgctgactggttcgcggcgaccttggcaaaggaatacaccaccgaaatcacggacctcgcaaatcgaaagcagcgggcctcccaccagccactgaccatggctgatgtctggccgtccacgatgtcgctgttctggggggcctccccgtccccactgcagcgagccgtgaccgaactgtcacggcggtggagcagagtcctcgaggggctgcagccagtcgacggtcgcatcgacacgacatcgtccgctctctcgggcgccgtggacgagcagttccccgtgtgcaccccgattccagaactgtcagtgcacagcccggacctccaggtcatcacctcgagcactagcaacatcgcctccggacgagtcactgcagtcatgggtgagctacatgcctgtctgagcagtctcgacatgccgttgctcgagtggtcgctgccccatggttccattcgcgatcgcatcaacaccgcgctcaacctgcgacgtctggttcccttgttccccgagacatggaggcgcaacaccggccgcatggttccagcgacggtcggagtgggggatcgcgcaatcgggttcactcggacggccgatcaagaccgtgcgaacacatggtcgatgtcggcactgctgttcgagcagaccgaggacggactcatgatccgtgatcccgatggcaggctctggaccatcgcacaagcgtggagcgtgcccatctccatggtcgccgccgatgcgttcaagatcgggctgcccggctcaccagcccctcggctcaccattgacaatctcgtcgtgttccgtcgtacctggaggtttcccgctggctccatcgacatcatgcacggttcagccgccgagaaacacgctcggctgagggagtggcaggtcacgaatcaccttcctgaccacctcttcgtcaagttcccctccgaacccaagccgatctacttctccttcgagtcccccgccatggccacggtcttcacgcgatcactgcagcgcgacgcccgagagaatccagacagtctcgtgacgatgtccgaagcactgcccgagcctcaatcctcatggctgcacgacacccggagccaccactacgtccacgaattccggctgcaactgaccaaggagcgacatgacgaccacagttgagacacatcccgaaacacgtggcacaaccgcgacatccatctccaatctgatcggtcacacccctctcgtaagaatggaccatctgttcgacggcctccccttcgaggtgtacggcaagctcgagaagctcaatcctggcggaagcatcaaggatcgagcagcacaatccatgatcgaacgggcaattcgacggggtgagatcgtcccgggccgtacgaccgtcatcgagtccagttcgggaaatctcggcatcgccgtggcgatactgtgccaggagcacggcctgaatttcatctgcgtaaccgatgccaaggccacgccaacgaacattcgactcatcgaagcgttcggggccactgttgaggtgatcgaagaacctcatcccgagagtggcgaattcctccccatgaggctcaagagggtaagagaactgctgtcagagattccagatgcatggtggccgaatcagtacgggaaccccgacaatccggcggctcacgagcggactgtccgcgagattatcgaggcaatcccgcgggttgacacgattgtctgcgcgaccggctcgtgcggaacccttcgcggctgccacgaagcattgcgaaagctgtccccacgcacccgactcgtcgccgtggacgccaagggcagcgccatcttcgacgaggcaggagcaccccatccccgctgtgtcccgggacacggtgcgtcagtgcgaccgccgctgtggcgcgcggggctcgccgaccaactggttctggtctccgacgcggactgcgtcgtgggatgccaggaggccctgcgcaccgaggctcttctcctcggcggatcctcgggagcaattctgacggccattcaccgagtgtctcccacgattcccgctggttccaccgtggtgacgatcctccccgacggcggcgagcgctacatcgacaccatctacagccgctcgtgggtcgactcacacatccccgggctgccctctctcgccgactggggggctcccaaccccgccaattcgtatgacctgaacagaagtgcctcatgaagctctacaccagagagaccgtcgaaactgcgcttgtcgggcgtcatggccaggttctcagtgccgtacagagtgcatacatgctgcattcgacgggagagacatcgctgccattctcaaccttcctccgcccggccgggtatccgaacgatcggatcatcgcacttcccgcccacatcggaggcgacttcgacatagccggtatcaagtggatctcatccttcccggaaaacctcgaccggggccagcaacgagcttcctccgtactcatcctcaatagtctggagacgggatacccgaccgccctgctggagtccagtcagatttcagcaacgcgaacggcagcatcagccgccctggccagcgccaccctccatggctccgaagaccatgtcagcacgattggcatcatcggctgcggaacaatcaatcttgcaacgatcgactacctcttccacgtgcacccccagatcaacgaggtcctctccttcgatctgaggcgggagcgggcccatgagttctcgcacctcgtcaaggcttcgcacccagaggcccgggtccgtgtcgccaaggagcccgacgagattctggccgcaagcaacaccatcgcgatcgccacgaccgactcgagtcattggttggaccttccgccgtggcacgggccggggcaccaagtcgtcctgcacacgtcgctgcgagacctgtcagtgccctcgatcctggcagcggccaacgtcgttgacgatcctgatcacgtctgccgtgaagcgacgtccttggatctggcaactcagcagaccggcaaccgggacttcatcacggggagaatcggagacctccttcttggcgcgccgctgtcctcaagtcctgactcccgtgtcattttctcacccttcgggctcggcatcctcgacctcgcagtcgcctccgtcgtcattgctgccgcctcctcttcagcagtcgagatcaatgggttcgaccccgggaaacacgccacaagcatgattgaggtgaatcgatgaccaccacacagatcaacgacaacacggccgttctgcgcgacgtattccccgccggctccgtcgcattcgtgagcggtgcctcacgcggaattggcgctgcctgcgcgacagcccttgcggccgcgggatgcaacctcgccatcacttatcgaaggaaggagaacgaggcggcacaaatcgccgaatccattgaagccatcgggcgccagtgcatcacaatgcagatggacgtaaccgatgagaaccaagtgaccagagccttccgcatcattcgccagcattacggacgcctggacgccgcggtcttgaactcgggaatcaccagtgacgggcatcttgcaacaatgagccgctccaagtggagctcggtgatcgacacgaatctgaccggaaccttcctctgcacgcgcgaggcgaccaaggccatgtactcgtccggtggctcgatcgtcatggtcgcgtccaccagtggagttgcagggcgaccgggccaggccaactacgcagccagcaagggcggaatcgttgccatgatgaagacgctggccccggaggttgcggcaaagaacgtccgggtgaatgcggtggcacccggcttcattcagaccgacatggtggcggccgttccaaaagcggcactcgcccaggcaatccaacacatccccatgggccgtcttggcctggcacaggaggttgcgtcagccgttaccttcctggcctccccgctcgccgcctacatcacagggaagaccctcactatcgatggcggaatgatcaacggctgaccccaggacccgcacacccccagtaccgagaaagaaacaacaatgaccgagatcacccacactgccaacagcatccgaacccgcgccgaggaacgttccaacaaagcttggcgcctgaaggaggagatcatctccaagctcggtctcgagaccaagccagaatatgtctcggacaaccaaccgctcttcggacgtggccttgagatggattcccttgacactctcgaagtcgtcgtcgccgtcaacaatgagttcggagtctcggtcaacgacgacgacgtacaggcgttcggctcgatcaatgccatggtcgatttcatcgaggtgaacgagaagtgagttctcttgcgctcgaggcgccacccaaggacgcccgtaagaaattcgcctacgacagcgatgccatcaagacgatgctcccacatcgttggccgatgctcatgattgatcgcgcctacgacgtcgtcccagggaaatcgggcaaaggcatcaagtcggtcagcgtcaatgagccgttcttcgccggtcactaccctgaccattccatcatgcccggcgtcatgatcgtcgagtcgatggctcaactcgtggccgtcatctacgtagccgaggccattcagaacaatcccggcatgacgtcgcacgacgcacgttcaagcgttggttatctcggcgcgatccgtcagatgaagttccgacgcctcgtcactccgggcgaccaactcaccctccacgcccagctcggcgagaaagtgggggctctgcgcgaggtttccgtgagagcactcaatggccgggatgtcgtcgcccagggggaactcgtcgtcaccgagcggtgacacccagccacacacgagaaggaagtcccatgatcgttcgcccctacaggccacgtgatgcggaagcgatcgtacatctctacaacagccattccgactcccccaatccagtgtcgggagggattgttgaggaggagttccagagggagctcgaagaacgtggttcgacagtgttcctagtggccgaggaggccggatccattgtcggcacattcgggatgttccgcacgaatggccgacacaccatggccgatgatgaagtcttcgccgacatgttctatgtcaccccgtcacatcgactctcgacagttccgggacagctaatcactgaagccatcagcgagtgcttcatccagggcatcaacgtgatccgcctcaccgtgaaccccgcgaacatctccgcgctcaaggtttacagaaaagtcggttgtgcctgtctcggggccaccgatgcaggcgaggacgggaacattgagctgtacaacttcatccctctggttcttagggcaaccatcaccaaactcgaccacgattgtattcgagccctggcggacatgacttcgttcgcctgcatcaccgagggacgtccacttgatctgtcccacgacttcatcgtggacgctggacggaagatcgtctcccacagcatccagatcgggcgttcaaccatccacgccatggtcgacacgggctcgaggaccattgtggaggccaccctcgacaaccgcgactgggatgctcctcgccagatcgtcgcccccaccccctgtcagaaccggcccgaggaacagcgaggcaaccctgtccggctggtgcacaagaagcttgaggtcaccttcaacgaaggagtcattgagatcagtacgactggccactggggcccggtcctcgcaatgtcctggccctcctccgtctcgcaccgcgctcacgggtggcgacagggccccgccaagtcgtatcgatgcgagcttctcgagaattgcctcgtcctggatgacgaaggaggagtgaaatgcaccatcagcctcaatgattgccaagtcgcgatccggatggatggtgccccaaaaacggaattgagaatgtaccagtggtgcagcctgcgccagggctatctgacggctgacaccggcatcacgagcttcaaccgggcatccagtgggctcggagtcgccgtccgggactcgtccgagattgtcgccgcgggccttcccgtcatccctgacacaccgatcacatggagtgagggtgacatcacggttcagctcgatccctgcggccgcgcctccctgatccactcgaccctggtggaccgaagaatccacttggacgagtctggctcggcaagtctcaccatgaccgtgtttggtgattcccagccccatcgtgccgacaccgtcgagctgcctcccctcgcggcaggcaccgacaggatcgtcctcaagccggctgccggaggcgtgaccacatggcgcttgggcgccaccaaggtgctcaagtcaccgtggccacacgcccgcgcgctcgggcccaatccgatctggcgagccggcctgtgggtcagtcacgagccggatcgccacgaccgtcgccaaggaatggggtggggtcccgatcatcgcagttggaccctgtcggaagacaccatgaccagtactgacgggacactctcctggcgcttcagcggctcccccgacaccggctggacggtcgacgtcacgacgagcaacacgcacggggagaccgtcgtctggctcaccccggactgcccggcgggcgagaggatccgcacgtctgatcatgccgtgacgaccatgcttgacatctcgaagccatggcagcgctggaccacccgatgcgcaattcctctcagacacgggaagtggttcctcatcgagcctgatcatgacctcactgattcccccgaaatcctcatgcgctctgttcacggggtcctgctcgtcggctgtgtcggacgagcccactccggatccgcttcctggcgctttgccatcacgtcagaactccccacctccaacccaagaagaaacgactacacctcagccgcctgaacccaaccagttggaacacccactacagaagaaatggagcaccaccatgtccatcactgagcagtacaagacccttcgcacctcggtcggcctccacacgcctaccggtcccctggtccgtatcaccggtgatgatcgtctcgagtttctcgacaccttcctgtcccgcgcctcggacttcgtggaccccgacaccactcgggagtgcctcgctctcaccgaggacggccttccgctgacgatcttcctccacatcgagcgcgaggaggagtcatggctccttccccgcaccgccatcgatgcggcgaccctcgccacgtacctcggcaacctcgagaccgatggtgacctgtcaatcgagattgctccagagggttggggagctgtcgctgtcgaggggccgctgtcgtggcagatcgccgaaaaccttctcgacttcgacgtggctggcctcgttcttcacgccgtcacggacgtcgtcgttcccggggcccccgagggatcgaaggcatggctcgcccgggtcggaaccactggagagtacggctacctgctcgtctccaacgttcccgacctcgcccgcacttatctcctcagccgcgccacggagctgggcggtcaggcagtcgacgccgatgctctcgcacgagtccaggccgaggccgggatgccctattacgcgatgggcgtgtgccacctcgatgtcgccgggggtgacctcgcctggctcgtggactggcagcgcatcggcgagttccaaggatccgagaatctgcccacacccgtccgagaccagcgccgactggccgccatcgccctgcccaccggcaaccgcccggaagctggtcagaccgtcgctgccggggatgaggagattggaatggtggtgtacgtcaccccgtccgccaatcccgatgaggaactcgcgttcgcacttctggatgctcctttctggactcccacccttccgttgaccgtcggtgcccacgacgggaccacggtcaccctgccccgcgtcgtggcagcctccagcctcaacaagctggggtgacagcgatgacgatcactgctgagaacgccaccacccgcagcgacattgcccggagcattgcggtgaccggcgtgggactggtcacggcacagggtgaccataccgacgagtgctggaccgaacttgtcgatggggtttgcggaatcaccatgaacgtcacgttcgatgactctggcaccacgattccgtgtgctggcgtggctcccattccgaactctgattcgatcgaccgctgttacctgctcggcgtccatgccatgcgtgaagctctcgagatgagtggcatcgacctggactccgtgggtcgtgatcgcatcggactcgtggtgggctcaagcctcggcgcgatgcccaccttggaggcggctcatcgccgggccattgagaccggcgtgctcgatgccggattggcggcagactcccagctccactgcgtcgccgaccacctcgccgctgagttcgacatccgtggaccccgcgtcgtgacatcgaatgcgtgtgccgctggtgccgtggcgatcggctacgccgcagaactcctctggtccgacgatgtggacctggtcgtctgtggcggtgtcgatccactggcccagatctctgccaatgggttcacgtgcctgggagctctcgacaatctcccatgcagcccgatggccggttcctccggtctgactctgggcgagggagccgggttcatggtcctcgagagaacagatgcggcggctgccagaggccaggaggtgatggccgaaatcgccggctacggcacaagttgtgatggttaccaccagactgccccggacccgggtggcaatggcgcccgcagctcaatggaggccgccctgcgctcagctcatctcaagccgtccgacgtcagctacgtcaatctccacggcaccggtactccgaccaacgacgccgtcgagccgaaggcactccggtcattgttcaagtccgatgaccttccccctgtcagttcggtgaagggcgccatcggtcacactctcggcgctgctggcgccatcgaggccgtgtgctcgatcaaggccatccacgagggggtcctgccgccaaccgtcaacaaccgcgggcaggcttcccgaactggtctcgacatcgtgccggagtgcgcacgcaaggccgctcccgacgtggtcatctccaactccttcgccttcgggggcaacaacgcatcagtggtcatcaccgcacctcgaggaggcgttcactgtaccgccccggcgcagcttcgcgaggtcggaatctcaggaatggcagctctggcgggaaaggccgccaactcggaggagcttctttcggccctgtcagaagattgtccaatctggatggccgatgagaagacctgggaaggggatgctgtccaaaccggccatgtggacatcaagcgcctgtcccgcacaatcaacccgtccaaggttcgtcggatggaccccttgggaatcatctccagcgcggtggtgactgatctgtatgcccgacacgggaagctgagccgcaaggatgccgaaagcacgggaatcatcttcgcaaccggctacggtcctgtgacggcggtgacgcagttcaatgacgggatcatccgccacggttccgagggtgccaacgccctggtgttcccgaacaccgtggtcaacgcagccgcaggccacctcgcgatgctgaatcgctaccgtggttacacggccaccttggcatgcggtggaaccagttcactcatggcgctgcttctcgctgctcgcgtcgttggccgcggcgctgcggatcgcatcatggtcgttatcgctgacgagtttcccagcattgccgtccaggccgtcgcgaagcttcctggctaccgacacagggttgatggttccggagccgtgctctcggaaggcgcggtatgcgtcctggtggaggccgtcgaagtcgccgaagcacgcggtaccgcccccatggcgctgctacgcggcttcggatcccgtggagagtccgtgggagtcggtcacaccgcatccgatggacgggcttgggccaaggccatggccgctgcactgggcccggccggcctgactgcctccgacgtgtcgaccgtcgtggcggcatcaagcggacatcctcgcgtcgaccgagccgagcaggcggccaggcggatcgtcggactgtccgcaaccgctacgaccttcccaaaggcgattgtcggagaaacacacggatcggctgccgggatcgggctgttcggtgccctgtgcggttcgaggtcagccgcgcaccagaacatccttgtcaacgccttttcccacggcggtggttatgcctcgatggtggtggagtcactgtgaccacgacgcttctgccacgggttgcccagccgggaccgggcgtcagccatgtcgacaccgaccgtcccatcgagtgcatcatcacccaccacccccacatgccgcgtgatcgcggaggccacgccacctccgtgtcaggcaggtacttgctgcgccaagccgcagaactcatgctcggcacggatcctgcgcattgccccgtcgtcgacccttcgcggcgctggtactggcccggaatcaatcttcacggttctgtctcccatgtcccgggctggagcctgacgacgctgagcaccggcggccacatcggggcagacatccaggacttccgggagcgtcccggcgcaatggcattcatcggtgacctggtcaagctgtcgcgatcggcgtcactccgagaattcgcggagtgcgaggccgtcgtcaaggtgtccgaattgactaaggagacgttcgggcacgtgcgactgcccgaatggacacccggatggcgccacgttttcgaggactactgggtctggagtctcgagatgcacgggatgggagtcatcgcactcgcatccgatctcccccgagccattcgctggtggcggtgcgacgccgatgcccgtggccgtctccaggctctccgacccataagcagtcttggaccaggaaggccgtcatgagccggtactcacgtcgaatctcaggcatcgaacgcggctatctcaacgccgcaacccggggcccgcaccccaccatccacacgatgatcgacttcgagggccgcgtccccgccgactgttggcggcacgcatccacgattgcgtcggccgccaaccctggcatgacagtggtccggaggtcgggccgatggacatccgatccagcgggctgtccggttgtgttccacgactggaccgcggaccccaacgacgttgccgacttccacgctgacatggatctcgtgacgggaccatcgtccacgctccacgttttcgagggggcggaacgcacccgaatcaccttggcagcaagccatgccgtgaccgatgggcggggcatcgaacgatttctcgtcgacctgcttgcagcgttggacgagcgtgaacccattggaagccccgacaccctgaccgatgtcgatatcaaacgatccttggagaacagcatcaagccccgacgccacctggccgctgtgcccgccgatgtcctttctccactgggggggaggaagaaccaacgtatatgggcctccaggacgtggcacagtgccccgggagccatgagcggaagaatcgctgccgctgtggccgagatgatcgaccacgccgcaatgatcatcatcccggttgacatccggcggcacgtcccagaggtccgatccacagcaaacctaagtgcccaactgccagtgatcatcaccccgaaccagcgctggcaaagcatccatgggcatctgctcacggaccttgctcgccatcgagaccttgcgatcatcagtgaggatttccgccacaacaatccgttcgcatcgaccttggaggaaagccaggccatcggcctcgatggtgtctatccctgtgccgcaatcatctccgaccacgggaagctcgacctttcaaggttccagaccttggaactcaccccggtctcgatgcgaagcctcccgatgctcgttccctactccgcaatgttcatcagcagttgcaccgtcggcgagaccaccactgtcaccatcgctcatcgcgctgatgacgatcccgattccataaacaccttcttccaccacatcgaatcccagatgtccatctgagccacgtcgtccctggagagcaaacatgaccacccaaaatgtcatcaccccgccgcgccccgtcacctcccatgccacggcgaccaggtccgaggctccaccgcgaagcgtcatcagagccatggccatctcgatggtcgcgaccctcatggtcatgctcgacacgaccgtcgtgaacgtgtccttgagcgcgaccaccgcccgcttcgggagcatgggcagcgtgcagtgggtcctcacaagttacctacttgcactgtgcgcgacgatgacggcctccgcctgggtcatcgaccgccttggtccacggctcaccttcatcgcctcaatgaccatgttcctcatcggctcggtgatgtgtgcactgagcgattcagtgtggcaactcgtcactggcaggaccatctccggtgccggagctgggatccttgttccgacagcatccgtcctgcttatccgtggcatcccacgcgaacaacttggcagggtgcaggcactgaatgggagtgtccagttgatcgctcccctgatcggcccgactgtgggcggtctcctcgttgacaggtgcgggggctggccggccatctactgggcgaacgtccccgtagctcttgttcttctgattgaggccgtccgcgtcgatccggacgaaccacacaccgctaagcgccgcctcgatgctctcggcctggtctgtggcagcaccgcgatcgtgctgacagtgcttggtgtctcactcttcggcaggacgtcgcgaaacaccaccttcctgcttacgatcggcgcgcttgcagtcctcgcatgggcgttcttcatcacccacatccgaagggctaccaaccctctgcttgacgtttccctgtatcagaaccctgtctattcatggtccagcttcaacgtagcggtgcttggtttcggtctctacgcccccatggtcgtcatgcccctctatctcgaggcgacgcgccacctcactgccgtccacactggtctggtgatgtcagtggccggcgtcggcgtcattatggccggaatcctgtgcacgaagatcatgggccggatcggtggaggcctcacgatgacagttggcataactctgagcatcatcgccactctgcccctggtccggctgacgaaccacacctcctacatactcctggcagtctgcttggccttgcgtggagcaggaatcagcctgacaatcgtcccagccatgacacgggccttcgagtccatcaagaggacggccatggcggacgcctctgcacagctcaacctgttgcagcgaatcggcgggacaattgcgacagcagtcatcatcgcagttatccaccacgaggccatgctcacccgcggactctcccccacagtgttctcgcacgccaacgtgtggatcctcaccgcgaccgccgtcacccttctgccggccttcgcgcttgcgaaggccgaaagacaacagcaggatctctgagcaccgaggagtactccctcgtagaccctcctctgatctaattgggttcgttccaagtgtgtatctcactccggggagccccgattgctgaaccacatcccgttcaccctggcgagtccctcgtggtacgacgtcccctgggcgcccggatctccgtatctcacaggagatatctcggtcctgccagcggactcgccaaggtggacgacgaccatccggggtccttggcaaatccacatgccacctcgtccgacccttccagaggtggggtggaaagtgcatgtgtctgccaagccatcggaattggaatcggttgcctcagtcgtagcactgtggtgcgtacgccacagcgtccccttcaaagtacttcgcacccgaggtctcgttcacgcgagtcaagtcaagtatgcggaccgaagtcagagcggcaaggtctgcacctgctaccccgacggcgagagccttgagcacttctgctccggtcttgccgagctgcttcagaacgtcgattcacctccggtgtccggcgagctgcgagtcggatcctcccctctgtggttgcgtcacgggagtttccgagaggcatgggcggtgtcatccacaggagtaccgttcccggtctacccgggaacaacacatcctgatcgtcgaggccccgcgcccgcagaatccgatcacgacacgccgtggatccggaggctccgtcggacgaatcgccccagcacggttcttcccatcgacgatgtcagactcctccaccgatcaaatgctggcggcgtgtatcaggcaacatggagagacggcacatcggtagtcgtcaaggaggcccggcacctgtccggacttgatgcggcgggtgtcgacgcccgagtgcggctgcgtcacgagtacgaggccctgagaagactggacccctatcgggccgctccccatcccattgatctcattgagaccgaggacggctcgttcctgatcatggaattccttgacggaatgacagtccaccaggagatgtcgaggttccatcctctgattagtaggcgacctcatcggctatcgatgaccgatttttcacgctggtgccgagaggtcgaagatcgcttgaggaatgtcacgagggtcatggccgggtgcggaatcgttcacggggatcttcatcccgcgaatctgatacatgtcggccatgaggttttggttactgactttgaatcctgctcaatcgacggggtcgccgtctcgtcaggaatcgccgctccctggttccagtcggacgacacgattcccgatccggcgacgactgacgatctccacactcttctcgtggatccgacttgcggccccgcgcttgtcccccatccaaatcttcgcgcgctcatcagccaggccgcagtcgaggacatgatgggaaatccgactggtttaccacatgcctggaacctcgaggacatgacaagcgaactcgccaaggggatccgggcatcagccactcccgcacgagccgaccgcctctttccctcagacccctacctgttcgggcatccaggttcagaattcggcctgatgcatggcgccgccggaatcatggctgctcttgccgtgactgggtacggtgttgacgcgaatcacgtgacctggatgaaggaccgcttggccacccgcccgaccctgctgccggggttggccaacggaatcgagggaattgccctgggtctctccctgtgcggtcagaacgacatggctgcatccctgctccaccagtccggaattctcacgatcacaacgaacggatcgactgacctcaccctcggtactggtatggcgggccgagcgtgcgcgctgcagtccctctcacaacgactgtcatcgaaatctctcgcccacgctgcatataccctctgggaacaactcgccgtggctgtgcggaacactgatgtggccttgccgaacggcctgttctccggttgggagggaatcgggctctccctgcttgcctctcccctgccggatcgtcatgatctcgcccgccactcactccgactggccctggccacgacaacgattgttgacggtgcgctcttctcaggcgagggacagatccgatggccatatctggggcgtggtcccgcggcatgtggcccgctcgccgccaggcttgatgatgaccagacggccaaggccgtggcacagacctgtcgttgtcccctgactgagtcatccggtctccacaatggccgcgcaggtctcctactcgtcctccgccagctcgtgggagaccaagacgacgccgttcgccgccacctcatgagactgtcgtggtcgatggaccgtcgcgaggaaggcacattgctgctgggtgatcatggcctgcgtttctcatccgatctcgcgacggggtcagccggcgccctcctcgccctgagcagggacccatggcggaacatgacacgaatgctcggaatatgcgatgacacctgtcatggcccactagtgacagtttgatctagcgccgatagttcacaactgaaagactccaaacatcgaggaaaacatgctgagccaaaacgccttggcaggcgtggctcgtttcaccacgatgaacaccaggagacagaatgtccgttgaggccatgcaatccatcgagatggacgaggaaaacagcgccagccagacagtttgcgcttgttacagcttcttctcgtggtcaggatgctgcgtagtctcccaagcggtggaagcatcttgatcgtgtgagacgccgtcgactaccctgtcccccgtggtacgcacacgccccgtcctggacagtcccggaagaccgctcatcgcctccggagtcgtcctggcggtcctgctcatcatcgcggtgatgacgatggtgcttcagcgcgaccccactctcacccccggacgccgcattctcggtatcgtcctgtccacggtccaggccgtcggattcatgtggctgcagacccgcatggttcgtcacggcaagggttcgcgcaacatgcgtgcgacccttggaagggtcggtttctgggccacgtggggactcgtcgcagtgggagtcgtcaatctgtggctgaccaactcgtggaccctcttcggggcctccgtcgccacgcccctccttctcctgccaggggtgtggagtgtggtggccaccctcgtgaccctgatcgtcggtttctccgacctcgtggtcacccacacctcgccactgacctcagccacggtcgtgctggtgaccatcgcggtgtcggtgaacctctacgcattcacgaagctgtcgacggcactcgttgaactccgctcctcccaggaggagatcgcccggctgcgcgtggacgccgagcgtcaccggatatcgcgggacctccacgacatcatcggtcgcaccctggtcgccacgtcgatgcgccagcaggcggccctccacctcgtcgaccgcgacccgcaacgggccaaggaacagctcgacgccgcccatgacgcaatcaccgaggggcagcaccagttgcgttccatcatccaggccgagatgagcaccagcctccccgacgagatcagcgacgccacattcctgtgcgaccgactccacatcgacttccgcatggatgaccgcggcagaccgcacaaacccttcgactcggcggcggcggcggccctgcgcgagggaatcacgaacatgctcaagcacagcgcggcgggctactgccacgtcgccatctccccggacctcctgaccgtcaccaacgacggttgtccgcaatcacctcgcccctccaccacaccgggcaccggaatcgaccatctccggtcccagatcgaggcgctcggtgggtcggtgacgacgtcgcggccctcgcggggcaccttccggctccgctgctccttcccgacccggggggcgtccacgaccacacccgcgaccgaaggaggacgatgacgacgagaatcctcctcgccgaggacatcaaactggtggcagaggccttcgaggcactgctctcggtggaaccggagttcgaggtcgtcgcacgggtggcacgcggcgacgacctggtcacatccgccacccgcctgttccccgacgtgatcctggccgacatcgacatgcccgggatgaccggcatcgaggccacccgaatgcttcgcgacaagggataccgcggcagaatcatcctgctcaccgccctgccgggaagcgggcacctgcacgccgcgatggctgccggagccgacgggtacctgctcaagtcgatcaccgcgccctccctcatcaacgccatccgggcggtgtgcaacggccagtcggccatcgacccgaacgtcgccgcggtcgccatgcgcaagggaccctcgcccctcaacgaccgggaaaccgagattctgcgcctagtcgccgacggttcctccaccgcgcagatcgcctcgcggctgtacctcagcaagggcaccgtcaggaactacctgtcgacggcgatgtcgaagctcgacgccgactcacgcacagcggcggtcacgcgggcacgcgaggagggctggctgtagcaggcgacccgctcagcccaccgcccctcagcccgccgactcctgacgcacggcctcctcgaccgcccggctgagcagggacccggccctgaccatcgacgtctccgggtccggctcgagatcggacaacgcgatgatccggtcgaacgcggaccgtttctcctcgggcaggtcacagcgtccgcacaccgcccagacgggcaccccggcgtcccgggcgatcttgcggatggtgtcgggaagcttgccgagcagggtctgctggtccagccgcccctcccccgtgacgacgagactggaggcggagatccgcgacaccgcgcgggaccatcccaggacgaccgccgcgcccgggcggtacctggtccccaggcacatcagcgcccagccgacccggctgggcggctgcgaaccccctggccaccgcccggcaggcctttcccgaactcagcgaccccttgaaggagtcgacggcaacgatgaccggcgcattcggatcaggacgcatgggatcagcatgtcacgtcgatacggagcagtcgcgccgcctacccctagactcgggggcatggtcaaccgagtctacctgtccctgagcgttctcgccctcgtgctgtgggtggtcgcctaccgtcacatgccgggctgggccgcgggcatcaccctggtgggcatcgtcgtgctgtcgctgtggtgcgagtggtcgcgggtgcgcaccctggccaggatcggcaagtcccgccagcagggcccccgctcctcccgaggacgcaacctgtcgtgagcaatacgattcccgcagccctccaccccggccctgacgaggcc

SEQ ID NO: 427 - DNA, 26620 bp, Propionibacterium acnes
  source 1..26620: mol_type = genomic DNA
ccttgtggacaccacgtcatccacatgacttgtgtcacatgattcccggaccatcatcaagcagatgctcacccaactgtaatgatttctgttctgaatctggacatgctctgacctgcattcaatgatcaattccgtgcgatattccacaacgcacggggaggtcgcagacaatgacaacagaaagcatccccacgcggctgctcgtgtggcacgagcagaccgatccgaccaagctcctcaggatcaccgacgcgatcaggaggggggatccccttccccccatcgaggccatggcgatcggccacagattcctcgtcctcgacggtgcgcaccgggcccaagcccaccagtactgccatcgatctgagatccgagcccgcctccacaacctccccctcagcgcggaaataccaggctggagccactccataccccgcgatgcagcagcgaaactggctcacctactcctccccgtggacgctctcggtcaggcggaaatcgtcctgcacggggtgcgccgtcaggtggggaccgcttcacaacgaccgcgcgacatctttctcgcctgccaccggatcgcgcgagttgcctacgcgcatggaatcagacctctcggcccggagttctccaacgctccgacgatcgacgccgccaccatgacctggcgcccgccgaacgtgggcacgttgtgggccatcgccagcagtctcggacccctgcccgcaactgtgacccggttcgccccgatcctccggcacgacgccatcggggattccgcgatgacacccgtcacctccgccgcgtgacgacccgcgccaattccgccccaccactggatgaggggcagccgcgtggacgatgctcctgttcaggcagggactccatacgagaccaataggaaaatcatgatcaaaaacacaagccctctgaccgtgaaaaatgtctcgaaaacattccgtggctccagcggagaagccatcaaggccgtgcaagacgtgtcattcaccgttgagcgtggtgaggttgtggcattcctcggcccgaacggcgccgggaagtccaccaccatcgacatggctctcggcctcacccgccccgacagcggccagatcgaggtcttcggtactgacccgctcagcgcggcccggtcgggacgctgcaccgcgatgacacagaccggcgggttgctgcccgacctcacgattgggcagaccatggagatcatctcctcgctctatcgtggctcccacatgaatgcctgcatggagcgagcaaggatcacgcatctggccgatcggcaggtgtcgatgtgctcgggaggcgagcgccaacgacttcgcttcgcactggctctgctgcccgatcctgacttcctcatcctcgacgagcccactgcggggatggatgtggaggcgcgccgggacttctgggcagagatccacgaggacacgcgtcgtggtcggacaattctgttcgcaacgcactacctcgacgaggtggacgagttcgccgatcgggtcatcctcatcaaggagggccgcgtcatcgccgacgacacctccgacgcgatccgcaccatgtcggggggttgcaccgttacggcgaccattcccgacttctccctggcacgactgaatctgccgggcacccaactcatcaagcagggcggcgcacgcgttgatctgcaccatcccgattccgatgccctcgcagcgcgagtcatccagctcggcggcaccgacctgcgcgtggtcccccgcagcctcgacgacgccttcctcgctctcacctcaaccaccaaggagtcctgacatgaccgcccaagcgcttcccgcagtcgccactcccaaggcccgccaccgatccgccatctcgctgaagtacttgtggtgcgagatgcgtcgccccttccggcgttcgacgatgctgttcaacctcgccctccccgcagttctgtacctggccctgttccgcaccgtccacaccgccgagctgccggacgggaacttcgcgatgtggatgatgatcggcatcgctgtctacggagcggccactgcgagcaccagctacgcagcctccatctccgtcgacgaggccaacgggtggacccgcaccatccgcctgacgccgttgtcgtcggtcgggtacgtgctggtgaaggtcctctgcgccatggccatcgccctggccccgaccctgctcatcggtctcatcgggctgttgaccggagctcacggcacgctgcgggtctgggtaatcggactgggggcggcttggctcagctcagcaatcttctccgccttcggcctggctctcggactgtccctgcgtcccgaggtcgtcatgcacgtccccggcctggtcatcaccggtctggcgttcctgggcaacgtcttcgtccccctcagcgggacgatgctcaccattggccgctggagccccgcctacggcatcaccgcgctggctcgttacccgctcaccaacggcatcgacatcgggggcggccacgactccctgacggctgccctcatcggcaccttctgctggttcgccggattcgtgttctgggcctcccgtcgatttaccaagagcacgggtcgtcagtgacagattcggccgatctccggaaggagcagtgttatgaccaagcccctcattgcagtggtcaccgcgggccaaggagcgcagaagcctcgcctgctcacgccatggctcaaggtccccggcgtcacggagaagcttgctgcatggtccgctcaggccgatgtggacctcgtcgagctcggtaccagggcgaatgcagaaaccttggcagcgaccgagaatgcgcagccactactggtctgtctcggagtcctcgtctcggatctcctggccgaccagaacattgtgctcgcaggacactccgtgggcgagctgacagcagcgtgtctcgccggggtagttgatcccgggacggccgtcactcttgcacgacggcgtggactggccatggcgcgggcctgcgctctccacccgaccaccatggcggccatcattggtgacaatccggatgacgtcctccggcggctctcggaactgggactcacggctgccaacatcaacggaggcggacagattgttgcggccggctccaccgacgcgatcgcggaactggtggcgacccctcccaacgggaccgcagtcaagccgttgcgagttgctggcgcctttcacaccaagtacatgacgcctgcgcaggacgctttcgcccaagctgctcaagacgtcaccttctccgacccgcagcacccgatcatctccaacctcgacgggcaggagatccggtccggcaatgacctgcgtgaacggctgattgcccaggtgaccgcgccagttcgatgggatctctgcatccagcagatcgcggatcgtcagccggaactcgccctatcggcccctccggggaaggtgcaggcgtcgctcttgtctcggcagatcccggacctcgcgacggtctgcatcaccacaccacgggaggcagcccaggctgcacagcggatcgaccagtccgtatccgtccttcagggggcatgatgctcatccccgagtacttcctcacagcctgttcggaccatgctgagcgcctggcgatcatcacccacaatgacgttgtgacgtgggccgaactggcgactcgcgtcgacggttttcggcgctggctgcgggaccatggcgtgcaccgccaggacagggtcgttctccagacgccaagcaccgtaggcacggtagccctcatgtgggcctgcctgctcgacggcgtgacgatggtcccggtgcaccaggacctcactgcctcccaggtgcagcaagtcatcgacgactgccgtccagctctggtgtgtggcagcccggacctcgtccaactcctcaactcccccggaatgaagacaagcacacctccaacgcggccggagtcaacgagtattctgccgtccttgtcccgggtcagccccgatgaccttgcgatgctcatctatacgtccggcacgacgggtctcccgaaggggatcatgtgtccccaccggcaggtcgccaccgccgcacggatcgtccatgactgtctcgggtaccgcacggacgacgtcattctctgtcgcctgccgttgtccttcgactacgggctctatcagattctgatgtctgccatctccggtagcgcggttgtcctgcgggacggaggcgcgcaggaccgcaacctggtgcgcgacatcgcccgtcacggcgtcactgtcgttccagtcgtgccgtccatggcgtcaatgctcatcaccctgcagcgtcgtgatcagttgccgaccatcgtcagactgttcacgaataccggggcgcgtctggcacccgagaccgcgaaccagttgctcgcaagcttccccggctcccgctatgcgtcgatgtatggcatgacggagtgcaagcgcatctccatccttccggtggaggagtacgagacgcatccggacagcgtgggaagagctctgcccagcactcacgtcgagatcgttgacgctcagggagttccggttccggcgggcgagcacggggagatcacggtgtccggcccgaccgtgatgaacggctactggcaggtgccgaacagtcccagtggacgattccgacccagcggccacggcctcactctgttcaccggtgatcgcggctggatggatgaggagggacgtctctacctcctcgggcgcgacgacgagatcgtcaagcatcacggcatccgaatcagcctgcaggagatcgagatagccgccgaagccgcgccgggcgtcgacgcagtcatcgctctcaagccggcctccgactcggcccccattgaaatcgcctactgcggcagcacgagtcccgagaacctggcccgccatctcgaaaccgtcctggaccgggcgcgacgaccccaattcatccaccaactccagcagatccccctgacccgtaacgggaaaccaaaccggtcagcagccgccgaggccatccgctcaagggcgtgacggcgaaggccaacacccacagacgaaaggaaaccaccatgacccaggccgagttcaaccagttcatcgagtccacctgctccgcgacgatcgtggatcccgaccgtcctttggtcgatcagggcatcgactccctcggaatgctcaccctcatggtcgctatcgaggacagcctcggcatcgaactggatcccgagtccctcgccgacggtaggggttccacgccctccggtcttctgtcccttgtcgagcagccgaaagcgacggtgtgacgacatgacgacgatggttccttgccgccgtgtggagatgccgcaactgttcgaccacatccccggaagcatctctctctcaggagggctgcccgatctgagcgtgctcccgagcaatcagatcgccgaactgacgtcccggatcatgcgtctcggctcaagaatcctcctgcaatactccaccccttcggtctcgtcctccttggtgccggccatcctggacctggcggaacgaacatgcatgtcaccggatccgcggaatctgatcccgaccgcgggttcccaactgggcctggccatggtgatcaatgcctttgacggcgatgagatcatctgtgactgcgccacctatcccggggcgctggccgccttcgcctctgccggcgtggaaacaacgggggtggccagtgacgaggaggggctcaacccagacgcgctcgctcacgccgtcgcagagggtcgggccaatggccgccgcatcgcagccgtctacaccacgcccaccttccagaatcccaccggctccgtacagtccgagaaccgccgtgcggccctgctcaaggtgtgtgctgacaatgacctcctcctcatcgaggacgatccgtacggcatgctgtccttcgacgggcagacgtggccagctctgaagtccatggacccacagcgcgtcatctacctgggcaccttctcgaaggtgttcgcaccgggcgtccgttccggctggatcgatccgcccgccaatcttgtcgagaaactccgcgctgtgtgcgagatcatgacactctcgccatcagccctcaaccaagcgatcatcggcgagtaccaccgtcgtcacggatgggacgaactgttggagggctatcgcgcctcctaccgcgaccgagcccgtctcctcatcggggctctcgaggctgaactggcaagaacgaattgcactggcacgtggacctggcgtgaaccacggggcggcttctacctgtggttggagaacgtcgccagcaccagcggtatcgacgttgcgcgtcgcgccgccgacaacggagtggccgtggtgcccgggaaacacttcgacgcagccggacacgattcgccgagcctgcgggtgtcgttcagcaattcacgcccggctgatctggtcgaaggagctcgtcgtctcgcccgtgcactggtgggagaggacgttcagaaatgactctcgcgacacgcaccgccaccgacaccctgcagcagaccttgccctggggcacccacgaacgtctcgtcttcgggcgggcgctcctgcgcagcaccggcttcccagccgaaggcttggccctgctcgactccgacgacatcctccccctcctcgactcctttcttgccggggacatcgacagaactcacttcgagaaggaatacaccagtcgcgaggagtccggcgcaagggcgctcatcaacgtcttgaaggacgatgcagtatcgcgcgccatcgcatggcagaaccccaccgcgtggaggtccttcgaatccctgtcgtccacgagcggaatcaatgcttcgactcggcgcaaggtacgccaactcgccctctactggcaacgttactgttccaaggctgagaccattggatacttcggcccgttcgcctgggccgaagtcgacccggaggcctctgcggtcgaattcatctcctccgaccatctgatcgaccgttcccacgtcgcaatggaggcgtgggcggtcattgagatcgggaaagccctggcatcacgggccgaccttcagtggtggatgccaccaatcctgtcccccgccgtcgacctcaacagggagagaggcaccgtgacggtggctggacaccagccacgacgggtccgggaggacgaggcacgagttctcttcctgaccgacggcacccgtcccgccgcccagatcgccaagagcctcgacatggagcccgagcggttgcgcaggatcctcgtggcccatgaacgtcgtcacaccgtgatctgggacgccaacatccctgtctcagtgcacgcgtgggacatcctgcacgaacgcattgcccagatcggagacgctgggctgcgagatgaggccactgctgttctcacgaggttcgacgagcttctggaggtcatccgcaacattcccgacgcccggtccctgacggaggcgacggaatccctgtcccgtcttttcgaaaccgtgacaggaacctcttcgaacagacgtgcgggccaggcatatgcagcccgcagcctgtgctacctggactgcacccgcgccggaaccgccaaggttgggacccggcttctcgaagccctcgacgcccccctcaacctcgtcctacaatccgctgactggttcgcggcgaccttggcaaaggaatacaccaccgaaatcacggacctcgcaaatcgaaagcagcgggcctcccaccagccactgaccatggctgatgtctggccgtccacgatgtcgctgttctggggggactcaccgtccccactgcagcgagccgtgaccgaactgtcacggcggtggagcagagtcctcgaggggctgcagccagtcgacggtcgcatcgacacgacatcgtccgctctctcgggcgccgtggacgagcagttccccgtgtgcaccccgattccagaactgtcagtgcacagcccggacctccaggtcatcacctcgagcactagcaacatcgcctccggacgagtcactgcagtcatgggtgagctacatgcctgtctgagcagtctcgacatgccgttgctcgagtggtcgctgccccatggttccattcgcgatcgcatcaacaccgcgctcaacctgcgacgtctggttcccttgttccccgagacatggaggcgcaacaccggccgcatggttccagcgacggtcggagtgggggatcgcgcaatcgggttcactcggacggccgatcaagaccgtgcgaacacatggtcgatgtcggcactgctgttcgagcagaccgaggacggactcatgatccgtgatcccgatggcaggctctggaccatcgcacaagcgtggagcgtgcccatctccatggtcgccgccgatgcgttcaagatcgggctgcccggctcaccagcccctcggctcaccattgacaatctcgtcgtgttccgtcgtacctggaggtttcccgctggctccatcgacatcatgcacggttcagccgccgagaaacacgctcggctgagggagtggcaggtcacgaatcaccttcctgaccacctcttcgtcaagttcccctccgaacccaagccgatctacttctccttcgagtcccccgccatggccacggtcttcacgcgatcactgcagcgcgacgcccgagagaatccagacagtctcgtgacgatgtccgaagcactgcccgagcctcaatcctcatggctgcacgacacccggagccaccactacgtccacgaattccggctgcaactgaccaaggagcgacatgacgaccacagttgagacacatcccgaaacacgtggcacaaccgcgacatccatctccaatctgatcggtcacacccctctcgtaagaatggaccatctgttcgacggcctccccttcgaggtgtacggcaagctcgagaagctcaatcctggcggaagcatcaaggatcgagcagcacaatccatgatcgaacgggcaattcgacggggtgagatcgtcccgggccgtacgaccgtcatcgagtccagttcgggaaatctcggcatcgccgtggcgatactgtgccaggagcacggcctgaatttcatctgcgtaaccgatgccaaggccacgccaacgaacattcgactcatcgaagcgttcggggccactgttgaggtgatcgaagaacctcatcccgagagtggcgaattcctccccatgaggctcaagagggtaagagaactgctgtcagagattccagatgcatggtggccgaatcagtacgggaaccccgacaatccggcggctcacgagcggactgtccgcgagatcatcgaggcaatcccgcgggttgacacgattgtctgcgcgaccggctcgtgcggaacccttcgcggctgccacgaagcattgcgaaagctgtccccacgcacccgactcgtcgccgtggacgccaagggcagcgccatcttcgacgaggcaggagcaccccatccccgctgtgtcccgggacacggtgcgtcagtgcgaccgccgctgtggcgcgcggggctcgccgaccaactggttctggtctccgacgcggactgcgtcgtgggatgccaggaggccctgcgcaccgaggctcttctcctcggcggatcctcgggagcaattctgacggccattcaccgagtgtctcccacgattcccgctggttccaccgtggtgacgatcctccccgacggcggcgagcgctacatcgacaccatctacagccgctcgtgggtcgactcacacatccccgggctgccctctctcgccgactggggggctcccaaccccgccaattcgtatgacctgaacagaagtgcctcatgaagctctacaccagagagaccgtcgaaactgcgcttgtcgggcgtcatggccaggttctcagtgccgtacagagtgcatacatgctgcattcgacgggagagacatcgctgccattctcaaccttcctccgcccggccgggtatccgaacgatcggatcatcgcacttcccgcccacatcggaggcgacttcgacatagccggtatcaagtggatctcatccttcccggaaaacctcgaccggggccagcaacgagcttcctccgtactcatcctcaatagtctggagacgggatacccgaccgccctgctggagtccagtcagatttcagcaacgcgaacggcagcatcagccgccctggccagcgccaccctccatggctccgaagaccatgtcagcacgattggcatcatcggctgcggaacaatcaatcttgcaacgatcgactacctcttccacgtgcacccccagatcaacgaggtcctctccttcgatctgaggcgggagcgggcccatgagttctcgcacctcgtcaaggcttcgcacccagaggcccgggtccgtgtcgccaaggagcccgacgagattctggccgcaagcaacaccatcgcgatcgccacgaccgactcgagtcattggttggaccttccgccgtggcacgggccggggcaccaagtcgtcctgcacacgtcgctgcgagacctgtcagtgccctcgatcctggcagcggccaacgtcgttgacgatcctgatcacgtctgccgtgaagcgacgtccttggatctggcaactcagcagaccggcaaccgggacttcatcacggggagaatcggagacctccttcttggcgcgccgctgtcctcaagtcctgactcccgtgtcattttctcacccttcgggctcggcatcctcgacctcgcagtcgcctccgtcgtcattgctgccgcctcctcttcagcagtcgagatcaatgggttcgaccccgggaaacacgccacaagcatgattgaggtgaatcgatgaccaccacacagatcaacgacaacacggccgttctgcgcgacgtattccccgccggctccgtcgcattcgtgagcggtgcctcacgcggaattggcgctgcctgcgcgacagcccttgcggccgcgggatgcaacctcgccatcacttatcgaaggaaggagaacgaggcggcacaaatcgccgaatccattgaagccatcgggcgccagtgcatcacaatgcagatggacgtaaccgatgagaaccaagtgaccagagccttccgcatcattcgccagcattacggacgcctggacgccgcggtcttgaactcgggaatcaccagtgacgggcatcttgcaacaatgagccgctccaagtggagctcggtgatcgacacgaatctgaccggaaccttcctctgcacgcgcgaggcgaccaaggccatgtactcgtccggtggctcgatcgtcatggtcgcgtccaccagtggagttgcagggcgaccgggccaggccaactacgcagccagcaagggcggaatcgttgccatgatgaagacgctggccccggaggttgcggcaaagaacgtccgggtgaatgcggtggcacccggcttcattcagaccgacatggtggcggccgttccaaaagcggcactcgcccaggcaatccaacacatccccatgggccgtcttggcctggcacaggaggttgcgtcagccgttaccttcctggcctccccgctcgccgcctacatcacagggaagacccttactatcgatggcggaatgatcaacggctgaccccaggacccgcacacccccagtaccgagaaagaaacaacaatgaccgagatcacccacactgccaacagcatccgaacccgcgccgaggaacgttccaacaaagcttggcgcctgaaggaggagatcatctccaagctcggtctcgagaccaagccagaatatgtctcggacaaccaaccgctcttcggacgtggccttgagatggattcccttgacactctcgaagtcgtcgtcgccgtcaacaatgagttcggagtctcggtcaacgacgacgacgtacaggcgttcggctcgatcaatgccatggtcgatttcatcgaggtgaacgagaagtgagttctcttgcgctcgaggcgccacccaaggacgcccgtaagaaattcgcctacgacagcgatgccatcaagacgatgctcccacatcgttggccgatgctcatgattgatcgcgcctacgacgtcgtcccagggaaatcgggcaaaggcatcaagtcggtcagcgtcaatgagccgttcttcgccggtcactaccctgaccattccatcatgcccggcgtcatgatcgtcgagtcgatggctcaactcgtggccgtcatctacgtagccgaggccattcagaacaatcccggcatgacgtcgcacgacgcacgttcaagcgttggttatctcggcgcgatccgtcagatgaagttccgacgcctcgtcactccgggcgaccaactcaccctccacgcccagctcggcgagaaagtgggggctctgcgcgaggtttccgtgagagcactcaatggccgggatgtcgtcgcccagggggaactcgtcgtcaccgagcggtgacacccagccacacacgagaaggaagtcccatgatcgttcgcccctacaggccacgtgatgcggaagcgatcatacatctctacaacagccattccgactcccccaatccagtgtcgggagggattgttgaggaggagttccagagggagctcgaagaacgtggttcgacagtgttcctagtggccgaggaggccggatccattgtcggcacattcgggatgttccgcacgaatggccgacacaccatggccgatgatgaagtcttcgccgacatgttctatgtcaccccgtcacatcgactctcgacagttccgggacagctaatcactgaagccatcagcgagtgcttcatccagggcatcaacgtgatccgcctcaccgtgaaccccgcgaacatctccgcgctcaaggtttacagaaaagtcggttgtgcctgtctcggggccaccgatgcaggcgaggacgggaacattgagctgtacaacttcatccctctggttcttagggcaaccatcaccaaactcgaccacgattgtattcgagccctggcggacatgacttcgttcgcctgcatcaccgagggacgtccacttgatctgtcccacgacttcatcgtggacgctggacggaagatcgtctcccacagcatccagatcgggcgttcaaccatccacgccatggtcgacacgggctcgaggaccattgtggaggccaccctcgacaaccgcgactgggatgctcctcgccagatcgtcgcccccaccccctgtcagaaccggcccgaggaacagcgaggcaaccctgtccggctggtgcacaagaagcttgaggtcaccttcaacgaaggagtcattgagatcagtacgactggccactggggcccggtcctcgcaatgtcctggccctcctccgtctcgcaccgcgctcacgggtggcgacagggccccgccaagtcgtatcgatgcgagcttctcgagaattgcctcgtcctggatgacgaaggaggagtgaaatgcaccatcagcctcaatgattgccaagtcgcgatccggatggatggtgccccaaaaacggaattgagaatgtaccagtggtgcagcctgcgccagggctatctgacggctgacaccggcatcacgagcttcaaccgggcatccagtgggctcggagtcgccgtccgggactcgtccgagattgtcgccgcgggccttcccgtcatccctgacacaccgatcacatggagtgagggtgacatcacggttcagctcgatccctgcggccgcgcctccctgatccactcgaccctggtggaccgaagaatccacttggacgagtctggctcggcaagtctcaccatgaccgtgtttggtgattcccagccccatcgtgccgacaccgtcgagctgcctcccctcgcggcaggcaccgacaggatcgtcctcaagccggctgccggaggcgtgaccacatggcgcttgggcgccaccaaggtgctcaagtcaccgtggccacacgcccgcgcgctcgggcccaatccgatctggcgagccggcctgtgggtcagtcacgagccggatcgccacgaccgtcgccaaggaatggggtggggtcccgatcatcgcagttggaccctgtcggaagacaccatgaccagtactgacgggacactctcctggcgcttcagcggctcccccgacaccggctggacggtcgacgtcacgacgagcaacacgcacggggagaccgtcgtctggctcaccccggactgcccggcgggcgagaggatccgcacgtctgatcatgccgtgacgaccatgcttgacatctcgaagccatggcagcgctggaccacccgatgcgcaattcctctcagacacgggaagtggttcctcatcgagcctgatcatgacctcactgattcccccgaaatcctcatgcgctctgttcacggggtcctgctcgtcggctgtgtcggacgagcccactccggatccgcttcctggcgctttgccatcacgtcagaactccccacctccaacccaagaagaaacgactacacctcagccgcctgaacccaaccagttggaacacccactacagaagaaatggagcaccaccatgtccatcactgagcagtacaagacccttcgcacctcggtcggcctccacacgcctaccggtcccctggtccgtatcaccggtgatgatcgtctcgagtttctcgacaccttcctgtcccgcgcctcggacttcgtggaccccgacaccactcgggagtgcctcgctctcaccgaggacggccttccgctgacgatcttcctccacatcgagcgcgaggaggagtcatggctccttccccgcaccgccatcgatgcggcgaccctcgccacgtacctcggcaacctcgagaccgatggtgacctgtcaatcgagattgctccagagggttggggagctgtcgctgtcgaggggccgctgtcgtggcagatcgccgaaaaccttctcgacttcgacgtggctggcctcgttcttcacgccgtcacggacgtcgtcgttcccggggcccccgagggatcgaaggcatggctcgcccgggtcggaaccactggagagtacggctacctgctcgtctccaacgttcccgacctcgcccgcacttatctcctcagccgcgccacggagctgggcggtcaggcagtcgacgccgatgctctcgcacgagtccaggccgaggccgggatgccctattacgcgatgggcgtgtgccacctcgatgtcgccgggggtgacctcgcctggctcgtggactggcagcgcatcggcgagttccaaggatccgagaatctgcccacacccgtccgagaccagcgccgactggccgccatcgccctgcccaccggcaaccgcccggaagctggtcagaccgtcgctgccggggatgaggagattggaatggtggtgtacgtcaccccgtccgccaatcccgatgaggaactcgcgttcgcacttctggatgctcctttctggactcccacccttccgttgaccgtcggtgcccacgacgggaccacggtcaccctgccccgcgtcgtggcagcctccagcctcaacaagctggggtgacagcgatgacgatcactgctgagaacgccaccacccgcagcgacattgcccggagcattgcggtgaccggcgtggggctggtcacggcacagggtgaccataccgacgagtgctggaccgaacttgtcgatggggtttgcggaatcaccatgaacgtcacgttcgatgactctggcaccacgattccgtgtgctggcgtggctcccattccgaactctgattcgatcgaccgctgttacctgctcggcgtccatgccatgcgtgaagctctcgagatgagtggcatcgacctggactccgtgggtcgtgatcgcatcggactcgtggtgggctcaagcctcggcgcgatgcccaccttggaggcggctcatcgccgggccattgagaccggcgtgctcgatgccggattggcggcagactcccagctccactgcgtcgccgaccacctcgccgctgagttcgacatccgtggaccccgcgtcgtgacatcgaatgcgtgtgccgctggtgccgtggcgatcggctacgccgcagaactcctctggtccgacgatgtggacctggtcgtctgtggcggtgtcgatccactggcccagatctctgccaatgggttcacgtgcctgggagctctcgacaatctcccatgcagcccgatggccggttcctccggtctgactctgggcgagggagccgggttcatggtcctcgagagaacagatgcggcggctgccagaggccaggaggtgatggccgaaatcgccggctacggcacaagttgtgatggttaccaccagactgccccggacccgggtggcaatggcgcccgcagctcaatggaggccgccctgcgctcagctcatctcaagccgtccgacgtcagctacgtcaatctccacggcaccggtactccgaccaacgacgccgtcgagccgaaggcactccggtcattgttcaagtccgatgaccttccccctgtcagttcggtgaagggcgccatcggtcacactctcggcgctgctggcgccatcgaggccgtgtgctcgatcaaggccatccacgagggggtcctgccgccaaccgtcaacaaccgcgggcaggcttcccgaactggtctcgacatcgtgccggagtgcgcacgcaaggccgctcccgacgtggtcatctccaactccttcgccttcgggggcaacaacgcatcagtggtcatcaccgcacctcgaggaggcgttcactgtaccgccccggcgcagcttcgcgaggtcggaatctcaggaatggcagctctggcgggaaaggccgccaactcggaggagcttctttcggccctgtcagaagattgtccaatctggatggccgatgagaagacctgggaaggggatgctgtccaaaccggccatgtggacatcaagcgcctgtcccgcacaatcaacccgtccaaggttcgtcggatggaccccttgggaatcatctccagcgcggtggtgactgatctgtatgcccgacacgggaagctgagccgcaaggatgccgaaagcacgggaatcatcttcgcaaccggctacggtcctgtgacggcggtgacgcagttcaatgacgggatcatccgccacggttccgagggtgccaacgccctggtgttcccgaacaccgtggtcaacgcagccgcaggccacctcgcgatgctgaatcgctaccgtggttacacggccaccttggcatgcggtggaaccagttcactcatggcgctgcttctcgctgctcgcgtcgttggccgcggcgctgcggatcgcatcatggtcgttatcgctgacgagtttcccagcattgccgtccaggccgtcgcgaagcttcctggctaccgacacagggttgatggttccggagccgtgctctcggaaggcgcggtatgcgtcctggtggaggccgtcgaagtcgccgaagcacgcggtaccgcccccatggcgctgctacgcggcttcggatcccgtggagagtccgtgggagtcggtcacaccgcatccgatggacgggcttgggccaaggccatggccgctgcactgggcccggccggcctgactgcctccgacgtgtcgaccgtcgtggcggcatcaagcggacatcctcgcgtcgaccgagccgagcaggcggccaggcggatcgtcggactgtccgcaaccgctacgaccttcccaaaggcgattgtcggagaaacacacggatcggctgccgggatcgggctgttcggtgccctgtgcggttcgaggtcagccgcgcaccagaacatccttgtcaacgccttttcccacggcggtggttatgcctcgatggtggtggagtcactgtgaccacgacgcttctgccacgggttgcccagccgggaccgggcgtcagccatgtcgacaccgaccgtcccatcgagtgcatcatcacccaccacccccacatgccgcgtgatcgcggaggccacgccacctccgtgtcaggcaggtacttgctgcgccaagccgcagaactcatgctcggcacggatcctgcgcattgccccgtcgtcgacccttcgcggcgctggtactggcccggaatcaatcttcacggttctgtctcccatgtcccgggctggagcctgacgacgctgagcaccggcggccacatcggggcagacatccaggacttccgggagcgtcccggcgcaatggcattcatcggtgacctggtcaagctgtcgcgatcggcgtcactccgagaattcgcggagtgcgaggccgtcgtcaaggtgtccgaattgactaaggagacgttcgggcacgtgcgactgcccgaatggacacccggatggcgccacgttttcgaggactactgggtctggagtctcgagatgcacgggatgggagtcatcgcactcgcatccgatctcccccgagccattcgctggtggcggtgcgacgccgatgcccgtggccgtctccaggctctccgacccataagcagtcttggaccaggaaggccgtcatgagccggtactcacgtcgaatctcaggcatcgaacgcggctatctcaacgccgcaacccggggcccgcaccccaccatccacacgatgatcgacttcgagggccgcgtccccgccgactgttggcggcacgcatccacgattgcgtcggccgccaaccctggcatgacagtggtccggaggtcgggccgatggacatccgatccagcgggctgtccggttgtgttccacgactggaccgcggaccccaacgacgttgccgacttccacgctgacatggatctcgtgacgggaccatcgtccacgctccacgttttcgagggggcggaacgcacccgaatcaccttggcagcaagccatgccgtgaccgatgggcggggcatcgaacgatttctcgtcgacctgcttgcagcgttggacgagcgtgaacccattggaagccccgacaccctgaccgatgtcgatatcaaacgatccttggagaacagcatcaagccccgacgccacctggccgctgtgcccgccgatgtcctttctccactgggggggaggaagaaccaacgtatatgggcctccaggacgtggcacagtgccccgggagccatgagcggaagaatcgctgccgctgtggccgagatgatcgaccacgccgcaatgatcatcatcccggttgacatccggcggcacgtcccagaggtccgatccacagcaaacctaagtgcccaactgccagtgatcatcaccccgaaccagcgctggcaaagcatccatgggcatctgctcacggaccttgctcgccatcgagaccttgcgatcatcagtgaggatttccgccacaacaatccgttcgcatcgaccttggaggaaagccaggccatcggcctcgatggtgtctatccctgtgccgcaatcatctccgaccacgggaagctcgacctttcaaggttccagaccttggaactcaccccggtctcgatgcgaagcctcccgatgctcgttccctactccgcaatgttcatcagcagttgcaccgtcggcgagaccaccactgtcaccatcgctcatcgcgctgatgacgatcccgattccataaacaccttcttccaccacatcgaatcccagatgtccatctgagccacgtcgtccctggagagcaaacatgaccacccaaaatgtcatcaccccgccgcgccccgtcacctcccatgccacggcgaccaggtccgaggctccaccgcgaagcgtcatcagagccatggccatctcgatggtcgcgaccctcatggtcatgctcgacacgaccgtcgtgaacgtgtccttgagcgcgaccaccgcccgcttcgggagcatgggcagcgtgcagtgggtcctcacaagttacctacttgcactgtgcgcgacgatgacggcctccgcctgggtcatcgaccgccttggtccacggctcaccttcatcgcctcaatgaccatgttcctcatcggctcggtgatgtgtgcactgagcgattcagtgtggcaactcgtcactggcaggaccatctccggtgccggagctgggatccttgttccgacagcatccgtcctgcttatccgtggcatcccacgcgaacaacttggcagggtgcaggcactgaatgggagtgtccagttgatcgctcccctgatcggcccgactgtgggcggtctcctcgttgacaggtgcgggggctggccggccatctactgggcgaacgtccccgtagctcttgttcttctgattgaggccgtccgcgtcgatccggacgaaccacacaccgctaagcgccgcctcgatgctctcggcctggtctgtggcagcaccgcgatcgtgctgacagtgcttggtgtctcactcttcggcaggacgtcgcgaaacaccaccttcctgcttacgatcggcgcgcttgcagtcctcgcatgggcgttcttcatcacccacatccgaagggctaccaaccctctgcttgacgtttccctgtatcagaaccctgtctattcatggtccagcttcaacgtagcggtgcttggtttcggtctctacgcccccatggtcgtcatgcccctctatctcgaggcgacgcgccacctcactgccgtccacactggtctggtgatgtcagtggccggcgtcggcgtcattatggccggaatcctgtgcacgaagatcatgggccggatcggtggaggcctcacgatgacagttggcataactctgagcatcatcgccactctgcccctggtccggctgacgaaccacacctcctacatactcctggcagtctgcttggccttgcgtggagcaggaatcagcctgacaatcgtcccagccatgacacgggccttcgagtccatcaagaggacggccatggcggacgcctctgcacagctcaacctgttgcagcgaatcggcgggacaattgcgacagcagtcatcatcgcagttatccaccacgaggccatgctcacccgcggactctcccccacagtgttctcgcacgccaacgtgtggatcctcaccgcgaccgccgtcacccttctgccggccttcgcgcttgcgaaggccgaaagacaacagcaggatctctgagcaccgaggagtactccctcgtagaccctcctctgatctaattgggttcgttccaagtgtgtatctcactccggggagccccgattgctgaaccacatcccgttcaccctggcgagtccctcgtggtacgacgtcccctgggcgcccggatctccgtatctcacaggagatatctcggtcctgccagcggactcgccaaggtggacgacgaccatccggggtccttggcaaatccacatgccacctcgtccgacccttccagaggtggggtggaaagtgcatgtgtctgccaagccatcggaattggaatcggttgcctcagtcgtagcactgtggtgcgtacgccacagcgtccccttcaaagtacttcgcacccgaggtctcgttcacgcgagtcaagtcaagtatgcggaccgaagtcagagcggcaaggtctgcacctgctaccccgacggcgagagccttgagcacttctgctccggtcttgccgagctgcttcagaacgtcgattcacctccggtgtccggcgagctgcgagtcggatcctcccctctgtggttgcgtcacgggagtttccgagaggcatgggcggtgtcatccacaggagtaccgttcccggtctacccgggaacaacacatcctgatcgtcgaggccccgcgcccgcagaatccgatcacgacacgccgtggatccggaggctccgtcggacgaatcgccccagcacggttcttcccatcgacgatgtcagactcctccaccgatcaaatgctggcggcgtgtatcaggcaacatggagagacggcacatcggtagtcgtcaaggaggcccggcacctgtccggacttgatgcggcgggtgtcgacgcccgagtgcggctgcgtcacgagtacgaggccctgagaagactggacccctatcgggccgctccccatcccattgatctcattgagaccgaggacggctcgttcctgatcatggaattccttgacggaatgacagtccaccaggagatgtcgaggttccatcctctgattagtaggcgacctcatcggctatcgatgaccgatttttcacgctggtgccgagaggtcgaagatcgcttgaggaatgtcacgagggtcatggccgggtgcggaatcgttcacggggatcttcatcccgcgaatctgatacatgtcggccatgaggttttggttactgactttgaatcctgctcaatcgacggggtcgccgtctcgtcagggatcgccgctccctggttccagtcggacgacacgattcccgatccggcgacgactgacgatctccacactcttctcgtggatccgacttgcggccccgcgcttgtcccccatccaaatcttcgcgcgctcatcagccaggccgcagtcgaggacatgatgggaaatccgactggtttaccacatgcctggaacctcgaggacatgacaagcgaactcgccaaggggatccgggcatcagccactcccgcacgagccgaccgcctctttccctcagacccctacctgttcgggcatccaggttcagaattcggcctgatgcatggcgccgccggaatcatggctgctcttgccgtgactgggtacggtgttgacgcgaatcacgtgacctggatgaaggaccgcttggccacccgcccgaccctgctgccggggttggccaacggaatcgagggaattgccctgggtctctccctgtgcggtcagaacgacatggctgcatccctgctccaccagtccggaattctcacgatcacaacgaacggatcgactgacctcaccctcggtactggtatggcgggccgagcgtgcgcgctgcagtccctctcacaacgactgtcatcgaaatctctcgcccacgctgcatataccctctgggaacaactcgccgtggctgtgcggaacactgatgtggccttgccgaacggcctgttctccggttgggagggaatcgggctctccctgcttgcctctcccctgccggatcgtcatgatctcgcccgccactcactccgactggccctggccacgacaacgattgttgacggtgcgctcttctcaggcgagggacagatccgatggccatatctggggcgtggtcccgcggcatgtggcccgctcgccgccaggcttgatgatgaccagacggccaaggccgtggcacagacctgtcgttgtcccctgactgagtcatccggtctccacaatggccgcgcaggtctcctactcgtcctccgccagctcgtgggagaccaagacgacgccgttcgccgccacctcatgagactgtcgtggtcgatggaccgtcgcgaggaaggcacattgctgctgggtgatcatggcctgcgtttctcatccgatctcgcgacggggtcagccggcgccctcctcgccctgagcagggacccatggcggaacatgacacgaatgctcggaatatgcgatgacacctgtcatggcccactagtgacagtttgatctagcgccgatagttcacaactgaaagactccaaacatcgaggaaaacatgctgagccaaaacgccttggcaggcgtggctcgtttcaccacgatgaacaccaggagacagaatgtccgttgaggccatgcaatccatcgagatggacgaggaaaacagcgccagccagacagtttgcgcttgttacagcttcttctcgtggtcaggatgctgcgtagtctcccaagcggtggaagcatcttgatcgtgtgagacgccgtcgactaccctgtcccccgtggtacgcacacgccccgtcctggacagtcccggaagaccgctcatcgcctccggagtcgtcctggcggtcctgctcatcatcgcggtgatgacgatggtgcttcagcgcgaccccactctcacccccggacgccgcattctcggtatcgtcctgtccacggtccaggccgtcggattcatgtggctgcagacccgcatggttcgtcacggcaagggttcgcgcaacatgcgtgcgacccttggaagggtcggtttctgggccacgtggggactcgtcgcagtgggagtcgtcaatctgtggctgaccaactcgtggaccctcttcggggcctccgtcgccacgcccctccttctcctgccaggggtgtggagtgtggtggccaccctcgtgaccctgatcgtcggtttctccgacctcgtggtcacccacacctcgccactgacctcagccacggtcgtgctggtgaccatcgcggtgtcggtgaacctctacgcattcacgaagctgtcgacggcactcgttgaactccgctcctcccaggaggagatcgcccggctgcgcgtggacgccgagcgtcaccggatatcgcgggacctccacgacatcatcggtcgcaccctggtcgccacgtcgatgcgccagcaggcggccctccacctcgtcgaccgcgacccgcaacgggccaaggaacagctcgacgccgcccatgacgcaatcaccgaggggcagcaccagttgcgttccatcatccaggccgagatgagcaccagcctccccgacgagatcagcgacgccacattcctgtgcgaccgactccacatcgacttccgcatggatgaccgcggcagaccgcacaaacccttcgactcggcggcggcggcggccctgcgcgagggaatcacgaacatgctcaagcacagcgcggcgggctactgccacgtcgccatctccccggacctcctgaccgtcaccaacgacggttgtccgcaatcacctcgcccctccaccacaccgggcaccggaatcgaccatctccggtcccagatcgaggcgctcggtgggtcggtgacgacgtcgcggccctcgcggggcaccttccggctccgctgctccttcccgacccggggggcgtccacgaccacacccgcgaccgaaggaggacgatgacgacgagaatcctcctcgccgaggacatcaaactggtggcagaggccttcgaggcactgctctcggtggaaccggagttcgaggtcgtcgcacgggtggcacgcggcgacgacctggtcacatccgccacccgcctgttccccgacgtgatcctggccgacatcgacatgcccgggatgaccggcatcgaggccacccgaatgcttcgcgacaagggataccgcggcagaatcatcctgctcaccgccctgccgggaagcgggcacctgcacgccgcgatggctgccggagccgacgggtacctgctcaagtcgatcaccgcgccctccctcatcaacgccatccgggcggtgtgcaacggccagtcggccatcgacccgaacgtcgccgcggtcgccatgcgcaagggaccctcgcccctcaacgaccgggaaaccgagattctgcgcctagtcgccgacggttcctccaccgcgcagatcgcctcgcggctgtacctcagcaagggcaccgtcaggaactacctgtcgacggcgatgtcgaagctcgacgccgactcacgcacagcggcggtcacgcgggcacgcgaggagggctggctgtagcaggcgacccgctcagcccaccgcccctcagcccgccgactcctgacgcacggcctcctcgaccgcccggctgagcagggacccggccctgaccatcgacgtctccgggtccggctcgaggtcggacaacgcgatgatccggtcgaacgcggaccgtttctcctcgggcaggtcacagcgtccgcacaccgcccagacgggcaccccggcgtcccgggcgatcttgcggatggtgtcgggaagcttgccgagcagggtctgctggtccagccgcccctcccccgtgacgacgagactggaggcggagatccgcgacaccgcgcgggaccatcccaggacgaccgccgcgcccgggcggtacctggtccccaggcacatcagcgcccagccgacccggctgggcggctgcgaaccccctggccaccgcccggcaggcctttcccgaactcagcgaccccttgaaggagtcgacggcaacgatgaccggcgcattcggatcaggacgcatgggatcagcatgtcacgtcgatacggagcagtcgcgccgcctacccctagactcgggggcatggtcaaccgagtctacctgtccctgagcgttctcgccctcgtgctgtgggtggtcgcctaccgtcacatgccgggctgggccgcgggcatcaccctggtgggcatcgtcgtgctgtcgctgtggtgcgagtggtcgcgggtgcgcaccctggccaggatcggcaagtcccgccagcagggcccccgctcctcccgaggacgcaacctgtcgtgagcaatacgattcccgcagccctccaccccggccctgacgaggcc

SEQ ID NO: 428 - DNA, 26620 bp, Propionibacterium acnes
  source 1..26620: mol_type = genomic DNA
ccttgtggacaccacgtcatccacatgacttgtgtcacatgattcccggaccatcatcaagcagatgctcacccaactgtaatgatttctgttctgaatctggacatgctctgacctgcattcaatgatcaattccgtgcgatattccacaacgcacggggaggtcgcagacaatgacaacagaaagcatccccacgcggctgctcgtgtggcacgagcagaccgatccgaccaagctcctcaggatcaccgacgcgatcaggaggggggatccccttccccccatcgaggccatggcgatcggccacagattcctcgtcctcgacggtgcgcaccgggcccaagcccaccagtactgccatcgatctgagatccgagcccgcctccacaacctccccctcagcgcggaaataccaggctggagccactccataccccgcgatgcagcagcgaaactggctcacctactcctccccgtggacgctctcggtcaggcggaaatcgtcctgcacggggtgcgccgtcaggtggggaccgcttcacaacgaccgcgcgacatctttctcgcctgccaccggatcgcgcgagttgcctacgcgcatggaatcagacctctcggcccggagttctccaacgctccgacgatcgacgccgccaccatgacctggcgcccgccgaacgtgggcacgttgtgggccatcgccagcagtctcggacccctgcccgcaactgtgacccggttcgccccgatcctccggcacgacgccatcggggattccgcgatgacacccgtcacctccgccgcgtgacgacccgcgccaattccgccccaccactggatgaggggcagccgcgtggacgatgctcctgttcaggcagggactccatacgagaccaataggaaaatcatgatcaaaaacacaagccctctgaccgtgaaaaatgtctcgaaaacattccgtggctccagcggagaagccatcaaggccgtgcaagacgtgtcattcaccgttgagcgtggtgaggttgtggcattcctcggcccgaacggcgccgggaagtccaccaccatcgacatggctctcggcctcacccgccccgacagcggccagatcgaggtcttcggtactgacccgctcagcgcggcccggtcgggacgctgcaccgcgatgacacagaccggcgggttgctgcccgacctcacgattgggcagaccatggagatcatctcctcgctctatcgtggctcccacatgaatgcctgcatggagcgagcaaggatcacgcatctggccgatcggcaggtgtcgatgtgctcgggaggcgagcgccaacgacttcgcttcgcactggctctgctgcccgatcctgacttcctcatcctcgacgagcccactgcggggatggatgtggaggcgcgccgggacttctgggcagagatccacgaggacacgcgtcgtggtcggacaattctgttcgcaacgcactacctcgacgaggtggacgagttcgccgatcgggtcatcctcatcaaggagggccgcgtcatcgccgacgacacctccgacgcgatccgcaccatgtcggggggttgcaccgttacggcgaccattcccgacttctccctggcacgactgaatctgccgggcacccaactcatcaagcagggcggcgcacgcgttgatctgcaccatcccgattccgatgccctcgcagcgcgagtcatccagctcggcggcaccgacctgcgcgtggtcccccgcagcctcgacgacgccttcctcgctctcacctcaaccaccaaggagtcctgacatgaccgcccaagcgcttcccgcagtcgccactcccaaggcccgccaccgatccgccatctcgctgaagtacttgtggtgcgagatgcgtcgccccttccggcgttcgacgatgctgttcaacctcgccctccccgcagttctgtacctggccctgttccgcaccgtccacaccgccgagctgccggacgggaacttcgcgatgtggatgatgatcggcatcgctgtctacggagcggccactgcgagcaccagctacgcagcctccatctccgtcgacgaggccaacgggtggacccgcaccatccgcctgacgccgttgtcgtcggtcgggtacgtgctggtgaaggtcctctgcgccatggccatcgccctggccccgaccctgctcatcggtctcatcgggctgttgaccggagctcacggcacgctgcgggtctgggtaatcggactgggggcggcttggctcagctcagcaatcttctccgccttcggcctggctctcggactgtccctgcgtcccgaggtcgtcatgcacgtccccggcctggtcatcaccggtctggcgttcctgggcaacgtcttcgtccccctcagcgggacgatgctcaccattggccgctggagccccgcctacggcatcaccgcgctggctcgttacccgctcaccaacggcatcgacatcgggggcggccacgactccctgacggctgccctcatcggcaccttctgctggttcgccggattcgtgttctgggcctcccgtcgatttaccaagagcacgggtcgtcagtgacagattcggccgatctccggaaggagcagtgttatgaccaagcccctcattgcagtggtcaccgcgggccaaggagcgcagaagcctcgcctgctcacgccatggctcaaggtccccggcgtcacggagaagcttgctgcatggtccgctcaggccgatgtggacctcgtcgagctcggtaccagggcgaatgcagaaaccttggcagcgaccgagaatgcgcagccactactggtctgtctcggagtcctcgtctcggatctcctggccgaccagaacattgtgctcgcaggacactccgtgggcgagctgacagcagcgtgtctcgccggggtagttgatcccgggacggccgtcactcttgcacgacggcgtggactggccatggcgcgggcctgcgctctccacccgaccaccatggcggccatcattggtgacaatccggatgacgtcctccggcggctctcggaactgggactcacggctgccaacatcaacggaggcggacagattgttgcggccggctccaccgacgcgatcgcggaactggtggcgacccctcccaacgggaccgcagtcaagccgttgcgagttgctggcgcctttcacaccaagtacatgacgcctgcgcaggacgctttcgcccaagctgctcaagacgtcaccttctccgacccgcagcacccgatcatctccaacctcgacgggcaggagatccggtccggcaatgacctgcgtgaacggctgattgcccaggtgaccgcgccagttcgatgggatctctgcatccagcagatcgcggatcgtcagccggaactcgccctatcggcccctccggggaaggtgcaggcgtcgctcttgtctcggcagatcccggacctcgcgacggtctgcatcaccacaccacgggaggcagcccaggctgcacagcggatcgaccagtccgtatccgtccttcagggggcatgatgctcatccccgagtacttcctcacagcctgttcggaccatgctgagcgcctggcgatcatcacccacaatgacgttgtgacgtgggccgaactggcgactcgcgtcgacggttttcggcgctggctgcgggaccatggcgtgcaccgccaggacagggtcgttctccagacgccaagcaccgtaggcacggtagccctcatgtgggcctgcctgctcgacggcgtgacgatggtcccggtgcaccaggacctcactgcctcccaggtgcagcaagtcatcgacgactgccgtccagctctggtgtgtggcagcccggacctcgtccaactcctcaactcccccggaatgaagacaagcacacctccaacgcggccggagtcaacgagtattctgccgtccttgtcccgggtcagccccgatgaccttgcgatgctcatctatacgtccggcacgacgggtctcccgaaggggatcatgtgtccccaccggcaggtcgccaccgccgcacggatcgtccatgactgtctcgggtaccgcacggacgacgtcattctctgtcgcctgccgttgtccttcgactacgggctctatcagattctgatgtctgccatctccggtagcgcggttgtcctgcgggacggaggcgcgcaggaccgcaacctggtgcgcgacatcgcccgtcacggcgtcactgtcgttccagtcgtgccgtccatggcgtcaatgctcatcaccctgcagcgtcgtgatcagttgccgaccatcgtcagactgttcacgaataccggggcgcgtctggcacccgagaccgcgaaccagttgctcgcaagcttccccggctcccgctatgcgtcgatgtatggcatgacggagtgcaagcgcatctccatccttccggtggaggagtacgagacgcatccggacagcgtgggaagagctctgcccagcactcacgtcgagatcgttgacgctcagggagttccggttccggcgggcgagcacggggagatcacggtgtccggcccgaccgtgatgaacggctactggcaggtgccgaacagtcccagtggacgattccgacccagcggccacggcctcactctgttcaccggtgatcgcggctggatggatgaggagggacgtctctacctcctcgggcgcgacgacgagatcgtcaagcatcacggcatccgaatcagcctgcaggagatcgagatagccgccgaagccgcgccgggcgtcgacgcagtcatcgctctcaagccggcctccgactcggcccccattgaaatcgcctactgcggcagcacgagtcccgagaacctggcccgccatctcgaaaccgtcctggaccgggcgcgacgaccccaattcatccaccaactccagcagatccccctgacccgtaacgggaaaccaaaccggtcagcagccgccgaggccatccgctcaagggcgtgacggcgaaggccaacacccacagacgaaaggaaaccaccatgacccaggccgagttcaaccagttcatcgagtccacctgctccgcgacgatcgtggatcccgaccgtcctttggtcgatcagggcatcgactccctcggaatgctcaccctcatggtcgctatcgaggacagcctcggcatcgaactggatcccgagtccctcgccgacggtaggggttccacgccctccggtcttctgtcccttgtcgagcagccgaaagcgacggtgtgacgacatgacgacgatggttccttgccgccgtgtggagatgccgcaactgttcgaccacatccccggaagcatctctctctcaggagggctgcccgatctgagcgtgctcccgagcaatcagatcgccgaactgacgtcccggatcatgcgtctcggctcaagaatcctcctgcaatactccaccccttcggtctcgtcctccttggtgccggccatcctggacctggcggaacgaacatgcatgtcaccggatccgcggaatctgatcccgaccgcgggttcccaactgggcctggccatggtgatcaatgcctttgacggcgatgagatcatctgtgactgcgccacctatcccggggcgctggccgccttcgcctctgccggcgtggaaacaacgggggtggccagtgacgaggaggggctcaacccagacgcgctcgctcacgccgtcgcagagggtcgggccaatggccgccgcatcgcagccgtctacaccacgcccaccttccagaatcccaccggctccgtacagtccgagaaccgccgtgcggccctgctcaaggtgtgtgctgacaatgacctcctcctcatcgaggacgatccgtacggcatgctgtccttcgacgggcagacgtggccagctctgaagtccatggacccacagcgcgtcatctacctgggcaccttctcgaaggtgttcgcaccgggcgtccgttccggctggatcgatccgcccgccaatcttgtcgagaaactccgcgctgtgtgcgagatcatgacactctcgccatcagccctcaaccaagcgatcatcggcgagtaccaccgtcgtcacggatgggacgaactgttggagggctatcgcgcctcctaccgcgaccgagcccgtctcctcatcggggctctcgaggctgaactggcaagaacgaattgcactggcacgtggacctggcgtgaaccacggggcggcttctacctgtggttggagaacgtcgccagcaccagcggtatcgacgttgcgcgtcgcgccgccgacaacggagtggccgtggtgcccgggaaacacttcgacgcagccggacacgattcgccgagcctgcgggtgtcgttcagcaattcacgcccggctgatctggtcgaaggagctcgtcgtctcgcccgtgcactggtgggagaggacgttcagaaatgactctcgcgacacgcaccgccaccgacaccctgcagcagaccttgccctggggcacccacgaacgtctcgtcttcgggcgggcgctcctgcgcagcaccggcttcccagccgaaggcttggccctgctcgactccgacgacatcctccccctcctcgactcctttcttgccggggacatcgacagaactcacttcgagaaggaatacaccagtcgcgaggagtccggcgcaagggcgctcatcaacgtcttgaaggacgatgcagtatcgcgcgccatcgcatggcagaaccccaccgcgtggaggtccttcgaatccctgtcgtccacgagcggaatcaatgcttcgactcggcgcaaggtacgccaactcgccctctactggcaacgttactgttccaaggctgagaccattggatacttcggcccgttcgcctgggccgaagtcgacccggaggcctctgcggtcgaattcatctcctccgaccatctgatcgaccgttcccacgtcgcaatggaggcgtgggcggtcattgagatcgggaaagccctggcatcacgggccgaccttcagtggtggatgccaccaatcctgtcccccgccgtcgacctcaacatggagagaggcaccgtgacggtggctggacaccagccacgacgggtccgggaggacgaggcacgagttctcttcctgaccgacggcacccgtcccgccgcccagatcgccaagagcctcgacatggagcccgagcggttgcgcaggatcctcgtggcccatgaacgtcgtcacaccgtgatctgggacgccaacatccctgtctcagtgcacgcgtgggacatcctgcacgaacgcattgcccagatcggagacgctgggctgcgagatgaggccactgctgttctcacgaggttcgacgagcttctggaggtcatccgcaacattcccgacgcccggtccctgacggaggcgacggaatccctgtcccgtcttttcgaaaccgtgacaggaacctcttcgaacagacgtgcgggccaggcatatgcagcccgcagcctgtgctacctggactgcacccgcgccggaaccgccaaggttgggacccggcttctcgaagccctcgacgcccccctcaacctcgtcctacaatccgctgactggttcgcggcgaccttggcaaaggaatacaccaccgaaatcacggacctcgcaaatcgaaagcagcgggcctcccaccagccactgaccatggctgatgtctggccgtccacgatgtcgctgttctggggggactcaccgtccccactgcagcgagccgtgaccgaactgtcacggcggtggagcagagtcctcgaggggctgcagccagtcgacggtcgcatcgacacgacatcgtccgctctctcgggcgccgtggacgagcagttccccgtgtgcaccccgattccagaactgtcagtgcacagcccggacctccaggtcatcacctcgagcactagcaacatcgcctccggacgagtcactgcagtcatgggtgagctacatgcctgtctgagcagtctcgacatgccgttgctcgagtggtcgctgccccatggttccattcgcgatcgcatcaacaccgcgctcaacctgcgacgtctggttcccttgttccccgagacatggaggcgcaacaccggccgcatggttccagcgacggtcggagtgggggatcgcgcaatcgggttcactcggacggccgatcaagaccgtgcgaacacatggtcgatgtcggcactgctgttcgagcagaccgaggacggactcatgatccgtgatcccgatggcaggctctggaccatcgcacaagcgtggagcgtgcccatctccatggtcgccgccgatgcgttcaagatcgggctgcccggctcaccagcccctcggctcaccattgacaatctcgtcgtgttccgtcgtacctggaggtttcccgctggctccatcgacatcatgcacggttcagccgccgagaaacacgctcggctgagggagtggcaggtcacgaatcaccttcctgaccacctcttcgtcaagttcccctccgaacccaagccgatctacttctccttcgagtcccccgccatggccacggtcttcacgcgatcactgcagcgcgacgcccgagagaatccagacagtctcgtgacgatgtccgaagcactgcccgagcctcaatcctcatggctgcacgacacccggagccaccactacgtccacgaattccggctgcaactgaccaaggagcgacatgacgaccacagttgagacacatcccgaaacacgtggcacaaccgcgacatccatctccaatctgatcggtcacacccctctcgtaagaatggaccatctgttcgacggcctccccttcgaggtgtacggcaagctcgagaagctcaatcctggcggaagcatcaaggatcgagcagcacaatccatgatcgaacgggcaattcgacggggtgagatcgtcccgggccgtacgaccgtcatcgagtccagttcgggaaatctcggcatcgccgtggcgatactgtgccaggagcacggcctgaatttcatctgcgtaaccgatgccaaggccacgccaacgaacattcgactcatcgaagcgttcggggccactgttgaggtgatcgaagaacctcatcccgagagtggcgaattcctccccatgaggctcaagagggtaagagaactgctgtcagagattccagatgcatggtggccgaatcagtacgggaaccccgacaatccggcggctcacgagcggactgtccgcgagatcatcgaggcaatcccgcgggttgacacgattgtctgcgcgaccggctcgtgcggaacccttcgcggctgccacgaagcattgcgaaagctgtccccacgcacccgactcgtcgccgtggacgccaagggcagcgccatcttcgacgaggcaggagcaccccatccccgctgtgtcccgggacacggtgcgtcagtgcgaccgccgctgtggcgcgcggggctcgccgaccaactggttctggtctccgacgcggactgcgtcgtgggatgccaggaggccctgcgcaccgaggctcttctcctcggcggatcctcgggagcaattctgacggccattcaccgagtgtctcccacgattcccgctggttccaccgtggtgacgatcctccccgacggcggcgagcgctacatcgacaccatctacagccgctcgtgggtcgactcacacatccccgggctgccctctctcgccgactggggggctcccaaccccgccaattcgtatgacctgaacagaagtgcctcatgaagctctacaccagagagaccgtcgaaactgcgcttgtcgggcgtcatggccaggttctcagtgccgtacagagtgcatacatgctgcattcgacgggagagacatcgctgccattctcaaccttcctccgcccggccgggtatccgaacgatcggatcatcgcacttcccgcccacatcggaggcgacttcgacatagccggtatcaagtggatctcatccttcccggaaaacctcgaccggggccagcaacgagcttcctccgtactcatcctcaatagtctggagacgggatacccgaccgccctgctggagtccagtcagatttcagcaacgcgaacggcagcatcagccgccctggccagcgccaccctccatggctccgaagaccatgtcagcacgattggcatcatcggctgcggaacaatcaatcttgcaacgatcgactacctcttccacgtgcacccccagatcaacgaggtcctctccttcgatctgaggcgggagcgggcccatgagttctcgcacctcgtcaaggcttcgcacccagaggcccgggtccgtgtcgccaaggagcccgacgagattctggccgcaagcaacaccatcgcgatcgccacgaccgactcgagtcattggttggaccttccgccgtggcacgggccggggcaccaagtcgtcctgcacacgtcgctgcgagacctgtcagtgccctcgatcctggcagcggccaacgtcgttgacgatcctgatcacgtctgccgtgaagcgacgtccttggatctggcaactcagcagaccggcaaccgggacttcatcacggggagaatcggagacctccttcttggcgcgccgctgtcctcaagtcctgactcccgtgtcattttctcacccttcgggctcggcatcctcgacctcgcagtcgcctccgtcgtcattgctgccgcctcctcttcagcagtcgagatcaatgggttcgaccccgggaaacacgccacaagcatgattgaggtgaatcgatgaccaccacacagatcaacgacaacacggccgttctgcgcgacgtattccccgccggctccgtcgcattcgtgagcggtgcctcacgcggaattggcgctgcctgcgcgacagcccttgcggccgcgggatgcaacctcgccatcacttatcgaaggaaggagaacgaggcggcacaaatcgccgaatccattgaagccatcgggcgccagtgcatcacaatgcagatggacgtaaccgatgagaaccaagtgaccagagccttccgcatcattcgccagcattacggacgcctggacgccgcggtcttgaactcgggaatcaccagtgacgggcatcttgcaacaatgagccgctccaagtggagctcggtgatcgacacgaatctgaccggaaccttcctctgcacgcgcgaggcgaccaaggccatgtactcgtccggtggctcgatcgtcatggtcgcgtccaccagtggagttgcagggcgaccgggccaggccaactacgcagccagcaagggcggaatcgttgccatgatgaagacgctggccccggaggttgcggcaaagaacgtccgggtgaatgcggtggcacccggcttcattcagaccgacatggtggcggccgttccaaaagcggcactcgcccaggcaatccaacacatccccatgggccgtcttggcctggcacaggaggttgcgtcagccgttaccttcctggcctccccgctcgccgcctacatcacagggaagaccctcactatcgatggcggaatgatcaacggctgaccccaggacccgcacacccccagtaccgagaaagaaacaacaatgaccgagatcacccacactgccaacagcatccgaacccgcgccgaggaacgttccaacaaagcttggcgcctgaaggaggagatcatctccaagctcggtctcgagaccaagccagaatatgtctcggacaaccaaccgctcttcggacgtggccttgagatggattcccttgacactctcgaagtcgtcgtcgccgtcaacaatgagttcggagtctcggtcaacgacgacgacgtacaggcgttcggctcgatcaatgccatggtcgatttcatcgaggtgaacgagaagtgagttctcttgcgctcgaggcgccacccaaggacgcccgtaagaaattcgcctacgacagcgatgccatcaagacgatgctcccacatcgttggccgatgctcatgattgatcgcgcctacgacgtcgtcccagggaaatcgggcaaaggcatcaagtcggtcagcgtcaatgagccgttcttcgccggtcactaccctgaccattccatcatgcccggcgtcatgatcgtcgagtcgatggctcaactcgtggccgtcatctacgtagccgaggccattcagaacaatcccggcatgacgtcgcacgacgcacgttcaagcgttggttatctcggcgcgatccgtcagatgaagttccgacgcctcgtcactccgggcgaccaactcaccctccacgcccagctcggcgagaaagtgggggctctgcgcgaggtttccgtgagagcactcaatggccgggatgtcgtcgcccagggggaactcgtcgtcaccgagcggtgacacccagccacacacgagaaggaagtcccatgatcgttcgcccctacaggccacgtgatgcggaagcgatcgtacatctctacaacagccattccgactcccccaatccagtgtcgggagggattgttgaggaggagttccagagggagctcgaagaacgtggttcgacagtgttcctagtggccgaggaggccggatccattgtcggcacattcgggatgttccgcacgaatggccgacacaccatggccgatgatgaagtcttcgccgacatgttctatgtcaccccgtcacatcgactctcgacagttccgggacagctaatcactgaagccatcagcgagtgcttcatccagggcatcaacgtgatccgcctcaccgtgaaccccgcgaacatctccgcgctcaaggtttacagaaaagtcggttgtgcctgtctcggggccaccgatgcaggcgaggacgggaacattgagctgtacaacttcatccctctggttcttagggcaaccatcaccaaactcgaccacgattgtattcgagccctggcggacatgacttcgttcgcctgcatcaccgagggacgtccacttgatctgtcccacgacttcatcgtggacgctggacggaagatcgtctcccacagcatccagatcgggcgttcaaccatccacgccatggtcgacacgggctcgaggaccattgtggaggccaccctcgacaaccgcgactgggatgctcctcgccagatcgtcgcccccaccccctgtcagaaccggcccgaggaacagcgaggcaaccctgtccggctggtgcacaagaagcttgaggtcaccttcaacgaaggagtcattgagatcagtacgactggccactggggcccggtcctcgcaatgtcctggccctcctccgtctcgcaccgcgctcacgggtggcgacagggccccgccaagtcgtatcgatgcgagcttctcgagaattgcctcgtcctggatgacgaaggaggagtgaaatgcaccatcagcctcaatgattgccaagtcgcgatccggatggatggtgccccaaaaacggaattgagaatgtaccagtggtgcagcctgcgccagggctatctgacggctgacaccggcatcacgagcttcaaccgggcatccagtgggctcggagtcgccgtccgggactcgtccgagattgtcgccgcgggccttcccgccatccccgacccacccatcacatggagtgagggtgacatcacggttcagctcgatccctgcggccgcgcctccctgatccactcgaccctggtggaccgaagaatccacttggacgagtctggctcggcaagtctcaccatgaccgtgtttggtgattcccagccccatcgtgccgacaccgtcgagctgcctcccctcgcggcaggcaccgacaggatcgtcctcaagccggctgccggaggcgtgaccacatggcgcttgggcgccaccaaggtgctcaagtcaccgtggccacacgcccgcgcgctcgggcccaatccgatctggcgagccggcctgtgggtcagtcacgagccggatcgccacgaccgtcgccaaggaatggggtggggtcccgatcatcgcagttggaccctgtcggaagacaccatgaccagtactgacgggacactctcctggcgcttcagcggctcccccgacaccggctggacggtcgacgtcacgacgagcaacacgcacggggagaccgtcgtctggctcaccccggactgcccggcgggcgagaggatccgcacgtctgatcatgccgtgacgaccatgcttgacatctcgaagccatggcagcgctggaccacccgatgcgcaattcctctcagacacgggaagtggttcctcatcgagcctgatcatgacctcactgattcccccgaaatcctcatgcgctctgttcacggggtcctgctcgtcggctgtgtcggacgagcccactccggatccgcttcctggcgctttgccatcacgtcagaactccccacctccaacccaagaagaaacgactacacctcagccgcctgaacccaaccagttggaacacccactacagaagaaatggagcaccaccatgtccatcactgagcagtacaagacccttcgcacctcggtcggcctccacacgcctaccggtcccctggtccgtatcaccggtgatgatcgtctcgagtttctcgacaccttcctgtcccgcgcctcggacttcgtggaccccgacaccactcgggagtgcctcgctctcaccgaggacggccttccgctgacgatcttcctccacatcgagcgcgaggaggagtcatggctccttccccgcaccgccatcgatgcggcgaccctcgccacgtacctcggcaacctcgagaccgatggtgacctgtcaatcgagattgctccagagggttggggagctgtcgctgtcgaggggccgctgtcgtggcagatcgccgaaaaccttctcgacttcgacgtggctggcctcgttcttcacgccgtcacggacgtcgtcgttcccggggcccccgagggatcgaaggcatggctcgcccgggtcggaaccactggagagtacggctacctgctcgtctccaacgttcccgacctcgcccgcacttatctcctcagccgcgccacggagctgggcggtcaggcagtcgacgccgatgctctcgcacgagtccaggccgaggccgggatgccctattacgcgatgggcgtgtgccacctcgatgtcgccgggggtgacctcgcctggctcgtggactggcagcgcatcggcgagttccaaggatccgagaatctgcccacacccgtccgagaccagcgccgactggccgccatcgccctgcccaccggcaaccgcccggaagctggtcagaccgtcgctgccggggatgaggagattggaatggtggtgtacgtcaccccgtccgccaatcccgatgaggaactcgcgttcgcacttctggatgctcctttctggactcccacccttccgttgaccgtcggtgcccacgacgggaccacggtcaccctgccccgcgtcgtggcagcctccagcctcaacaagctggggtgacagcgatgacgatcactgctgagaacgccaccacccgcagcgacattgcccggagcattgcggtgaccggcgtgggactggtcacggcacagggtgaccataccgacgagtgctggaccgaacttgtcgatggggtttgcggaatcaccatgaacgtcacgttcgatgactctggcaccacgattccgtgtgctggcgtggctcccattccgaactctgattcgatcgaccgctgttacctgctcggcgtccatgccatgcgtgaagctctcgagatgagtggcatcgacctggactccgtgggtcgtgatcgcatcggactcgtggtgggctcaagcctcggcgcgatgcccaccttggaggcggctcatcgccgggccattgagaccggcgtgctcgatgccggattggcggcagactcccagctccactgcgtcgccgaccacctcgccgctgagttcgacatccgtggaccccgcgtcgtgacatcgaatgcgtgtgccgctggtgccgtggcgatcggctacgccgcagaactcctctggtccgacgatgtggacctggtcgtctgtggcggtgtcgatccactggcccagatctctgccaatgggttcacgtgcctgggagctctcgacaatctcccatgcagcccgatggccggttcctccggtctgactctgggcgagggagccgggttcatggtcctcgagagaacagatgcggcggctgccagaggccaggaggtgatggccgaaatcgccggctacggcacaagttgtgatggttaccaccagactgccccggacccgggtggcaatggcgcccgcagctcaatggaggccgccctgcgctcagctcatctcaagccgtccgacgtcagctacgtcaatctccacggcaccggtactccgaccaacgacgccgtcgagccgaaggcactccggtcattgttcaagtccgatgaccttccccctgtcagttcggtgaagggcgccatcggtcacactctcggcgctgctggcgccatcgaggccgtgtgctcgatcaaggccatccacgagggggtcctgccgccaaccgtcaacaaccgcgggcaggcttcccgaactggtctcgacatcgtgccggagtgcgcacgcaaggccgctcccgacgtggtcatctccaactccttcgccttcgggggcaacaacgcatcagtggtcatcaccgcacctcgaggaggcgttcactgtaccgccccggcgcagcttcgcgaggtcggaatctcaggaatggcagctctggcgggaaaggccgccaactcggaggagcttctttcggccctgtcagaagattgtccaatctggatggccgatgagaagacctgggaaggggatgctgtccaaaccggccatgtggacatcaagcgcctgtcccgcacaatcaacccgtccaaggttcgtcggatggaccccttgggaatcatctccagcgcggtggtgactgatctgtatgcccgacacgggaagctgagccgcaaggatgccgaaagcacgggaatcatcttcgcaaccggctacggtcctgtgacggcggtgacgcagttcaatgacgggatcatccgccacggttccgagggtgccaacgccctggtgttcccgaacaccgtggtcaacgcagccgcaggccacctcgcgatgctgaatcgctaccgtggttacacggccaccttggcatgcggtggaaccagttcactcatggcgctgcttctcgctgctcgcgtcgttggccgcggcgctgcggatcgcatcatggtcgttatcgctgacgagtttcccagcattgccgtccaggccgtcgcgaagcttcctggctaccgacacagggttgatggttccggagccgtgctctcggaaggcgcggtatgcgtcctggtggaggccgtcgaagtcgccgaagcacgcggtaccgcccccatggcgctgctacgcggcttcggatcccgtggagagtccgtgggagtcggtcacaccgcatccgatggacgggcttgggccaaggccatggccgctgcactgggcccggccggcctgactgcctccgacgtgtcgaccgtcgtggcggcatcaagcggacatcctcgcgtcgaccgagccgagcaggcggccaggcggatcgtcggactgtccgcaaccgctacgaccttcccaaaggcgattgtcggagaaacacacggatcggctgccgggatcgggctgttcggtgccctgtgcggttcgaggtcagccgcgcaccagaacatccttgtcaacgccttttcccacggcggtggttatgcctcgatggtggtggagtcactgtgaccacgacgcttctgccacgggttgcccagccgggaccgggcgtcagccatgtcgacaccgaccgtcccatcgagtgcatcatcacccaccacccccacatgccgcgtgatcgcggaggccacgccacctccgtgtcaggcaggtacttgctgcgccaagccgcagaactcatgctcggcacggatcctgcgcattgccccgtcgtcgacccttcgcggcgctggtactggcccggaatcaatcttcacggttctgtctcccatgtcccgggctggagcctgacgacgctgagcaccggcggccacatcggggcagacatccaggacttccgggagcgtcccggcgcaatggcattcatcggtgacctggtcaagctgtcgcgatcggcgtcactccgagaattcgcggagtgcgaggccgtcgtcaaggtgtccgaattgactaaggagacgttcgggcacgtgcgactgcccgaatggacacccggatggcgccacgttttcgaggactactgggtctggagtctcgagatgcacgggatgggagtcatcgcactcgcatccgatctcccccgagccattcgctggtggcggtgcgacgccgatgcccgtggccgtctccaggctctccgacccataagcagtcttggaccaggaaggccgtcatgagccggtactcacgtcgaatctcaggcatcgaacgcggctatctcaacgccgcaacccggggcccgcaccccaccatccacacgatgatcgacttcgagggccgcgtccccgccgactgttggcggcacgcatccacgattgcgtcggccgccaaccctggcatgacagtggtccggaggtcgggccgatggacatccgatccagcgggctgtccggttgtgttccacgactggaccgcggaccccaacgacgttgccgacttccacgctgacatggatctcgtgacgggaccatcgtccacgctccacgttttcgagggggcggaacgcacccgaatcaccttggcagcaagccatgccgtgaccgatgggcggggcatcgaacgatttctcgtcgacctgcttgcagcgttggacgagcgtgaacccattggaagccccgacaccctgaccgatgtcgatatcaaacgatccttggagaacagcatcaagccccgacgccacctggccgctgtgcccgccgatgtcctttctccactgggggggaggaagaaccaacgtatatgggcctccaggacgtggcacagtgccccgggagccatgagcggaagaatcgctgccgctgtggccgagatgatcgaccacgccgcaatgatcatcatcccggttgacatccggcggcacgtcccagaggtccgatccacagcaaacctaagtgcccaactgccagtgatcatcaccccgaaccagcgctggcaaagcatccatgggcatctgctcacggaccttgctcgccatcgagaccttgcgatcatcagtgaggatttccgccacaacaatccgttcgcatcgaccttggaggaaagccaggccatcggcctcgatggtgtctatccctgtgccgcaatcatctccgaccacgggaagctcgacctttcaaggttccagaccttggaactcaccccggtctcgatgcgaagcctcccgatgctcgttccctactccgcaatgttcatcagcagttgcaccgtcggcgagaccaccactgtcaccatcgctcatcgcgctgatgacgatcccgattccataaacaccttcttccaccacatcgaatcccagatgtccatctgagccacgtcgtccctggagagcaaacatgaccacccaaaatgtcaccaccccgccgcgccccgtcacctcccatgccacggcgaccaggtccgaggctccaccgcgaagcgtcatcagagccatggccatctcgatggtcgcgaccctcatggtcatgctcgacacgaccgtcgtgaacgtgtccttgagcgcgaccaccgcccgcttcgggagcatgggcagcgtgcagtgggtcctcacaagttacctacttgcactgtgcgcgacgatgacggcctccgcctgggtcatcgaccgccttggtccacggctcaccttcatcgcctcaatgaccatgttcctcatcggctcggtgatgtgtgcactgagcgattcagtgtggcaactcgtcactggcaggaccatctccggtgccggagctgggatccttgttccgacagcatccgtcctgcttatccgtggcatcccacgcgaacaacttggcagggtgcaggcactgaatgggagtgtccagttgatcgctcccctgatcggcccgactgtgggcggtctcctcgttgacaggtgcgggggctggccggccatctactgggcgaacgtccccgtagctcttgttcttctgattgaggccgtccgcgtcgatccggacgaaccacacaccgctaagcgccgcctcgatgctctcggcctggtctgtggcagcaccgcgatcgtgctgacagtgcttggtgtctcactcttcggcaggacgtcgcgaaacaccaccttcctgcttacgatcggcgcgcttgcagtcctcgcatgggcgttcttcatcacccacatccgaagggctaccaaccctctgcttgacgtttccctgtatcagaaccctgtctattcatggtccagcttcaacgtagcggtgcttggtttcggtctctacgcccccatggtcgtcatgcccctctatctcgaggcgacgcgccacctcactgccgtccacactggtctggtgatgtcagtggccggcgtcggcgtcattatggccggaatcctgtgcacgaagatcatgggccggatcggtggaggcctcacgatgacagttggcataactctgagcatcatcgccactctgcccctggtccggctgacgaaccacacctcctacatactcctggcagtctgcttggccttgcgtggagcaggaatcagcctgacaatcgtcccagccatgacacgggccttcgagtccatcaagaggacggccatggcggacgcctctgcacagctcaacctgttgcagcgaatcggcgggacaattgcgacagcagtcatcatcgcagttatccaccacgaggccatgctcacccgcggactctcccccacagtgttctcgcacgccaacgtgtggatcctcaccgcgaccgccgtcacccttctgccggccttcgcgcttgcgaaggccgaaagacaacagcaggatctctgagcaccgaggagtactccctcgtagaccctcctctgatctaattgggttcgttccaagtgtgtatctcactccggggagccccgattgctgaaccacatcccgttcaccctggcgagtccctcgtggtacgacgtcccctgggcgcccggatctccgtatctcacaggagatatctcggtcctgccagcggactcgccaaggtggacgacgaccatccggggtccttggcaaatccacatgccacctcgtccgacccttccagaggtggggtggaaagtgcatgtgtctgccaagccatcggaattggaatcggttgcctcagtcgtagcactgtggtgcgtacgccacagcgtccccttcaaagtacttcgcacccgaggtctcgttcacgcgagtcaagtcaagtatgcggaccgaagtcagagcggcaaggtctgcacctgctaccccgacggcgagagccttgagcacttctgctccggtcttgccgagctgcttcagaacgtcgattcacctccggtgtccggcgagctgcgagtcggatcctcccctctgtggttgcgtcacgggagtttccgagaggcatgggcggtgtcatccacaggagtaccgttcccggtctacccgggaacaacacatcctgatcgtcgaggccccgcgcccgcagaatccgatcacgacacgccgtggatccggaggctccgtcggacgaatcgccccagcacggttcttcccatcgacgatgtcagactcctccaccgatcaaatgctggcggcgtgtatcaggcaacatggagagacggcacatcggtagtcgtcaaggaggcccggcacctgtccggacttgatgcggcgggggtcgacgcccgagtgcggctgcgtcacgagtacgaggccctgagaagactggacccctatcgggccgctccccatcccattgatctcattgagaccgaggacggctcgttcctgatcatggaattccttgacggaatgacagtccaccaggagatgtcgaggttccatcctctgattagtaggcgacctcatcggctatcgatgaccgatttttcacgctggtgccgagaggtcgaagatcgcttgaggaatgtcacgagggtcatggccgggtgcggaatcgttcacggggatcttcatcccgcgaatctgatacatgtcggccatgaggttttggttactgactttgaatcctgctcaatcgacggggtcgccgtctcgtcagggatcgccgctccctggttccagtcggacgacacgattcccgatccggcgacgactgacgatctccacactcttctcgtggatccgacttgcggccccgcgcttgtcccccatccaaatcttcgcgcgctcatcagccaggccgcagtcgaggacatgatgggaaatccgactggtttaccacatgcctggaacctcgaggacatgacaagcgaactcgccaaggggatccgggcatcagccactcccgcacgagccgaccgcctctttccctcagacccctacctgttcgggcatccaggttcagaattcggcctgatgcatggcgccgccggaatcatggctgctcttgccgtgactgggtacggtgttgacgcgaatcacgtgacctggatgaaggaccgcttggccacccgcccgaccctgctgccggggttggccaacggaatcgagggaattgccctgggtctctccctgtgcggtcagaacgacatggctgcatccctgctccaccagtccggaattctcacgatcacaacgaacggatcgactgacctcaccctcggtactggtatggcgggccgagcgtgcgcgctgcagtccctctcacaacgactgtcatcgaaatctctcgcccacgctgcatataccctctgggaacaactcgccgtggctatgcggaacactgatgtggccttgccgaacggcctgttctccggttgggagggaatcgggctctccctgcttgcctctcccctgccggatcgtcatgatctcgcccgccactcactccgactggccctggccacgacaacgattgttgacggtgcgctcttctcaggcgagggacagatccgatggccatatctggggcgtggtcccgcggcatgtggcccgctcgccgccaggcttgatgatgaccagacggccaaggccgtggcacagacctgtcgttgtcccctgactgagtcatccggtctccacaatggccgcgcaggtctcctactcgtcctccgccagctcgtgggagaccaagacgacgccgttcgccgccacctcatgagactgtcgtggtcgatggaccgtcgcgaggaaggcacattgctgctgggtgatcatggcctgcgtttctcatccgatctcgcgacggggtcagccggcgccctcctcgccctgagcagggacccatggcggaacatgacacgaatgctcggaatatgcgatgacacctgtcatggcccactagtgacagtttgatctagcgccgatagttcacaactgaaagactccaaacatcgaggaaaacatgctgagccaaaacgccttggcaggcgtggctcgtttcaccacgatgaacaccaggagacagaatgtccgttgaggccatgcaatccatcgagatggacgaggaaaacagcgccagccagacagtttgcgcttgttacagcttcttctcgtggtcaggatgctgcgtagtctcccaagcggtggaagcatcttgatcgtgtgagacaccgtcgactaccctgtcccccgtggtacgcacacgccccgtcctggacagtcccggaagaccgctcatcgcctccggagtcgtcctggcggtcctgctcatcatcgcggtgatgacgatggtgcttcagcgcgaccccactctcacccccggacgccgcattctcggtatcgtcctgtccacggtccaggccgtcggattcatgtggctgcagacccgcatggttcgtcacggcaagggttcgcgcaacatgcgtgcgacccttggaagggtcggtttctgggccacgtggggactcgtcgcagtgggagtcgtcaatctgtggctgaccaactcgtggaccctcttcggggcctccgtcgccacgcccctccttctcctgccaggggtgtggagtgtggtggccaccctcgtgaccctgatcgtcggtttctccgacctcgtggtcacccacacctcgccactgacctcagccacggtcgtgctggtgaccatcgcggtgtcggtgaacctctacgcattcacgaagctgtcgacggcactcgttgaactccgctcctcccaggaggagatcgcccggctgcgcgtggacgccgagcgtcaccggatatcgcgggacctccacgacatcatcggtcgcaccctggtcgccacgtcgatgcgccagcaggcggccctccacctcgtcgaccgcgacccgcaacgggccaaggaacagctcgacgccgcccatgacgcaatcaccgaggggcagcaccagttgcgttccatcatccaggccgagatgagcaccagcctccccgacgagatcagcgacgccacattcctgtgcgaccgactccacatcgacttccgcatggatgaccgcggcagaccgcacaaacccttcgactcggcggcggcggcggccctgcgcgagggaatcacgaacatgctcaagcacagcgcggcgggctactgccacgtcgccatctccccggacctcctgaccgtcaccaacgacggttgtccgcaatcacctcgcccctccaccacaccgggcaccggaatcgaccatctccggtcccagatcgaggcgctcggtgggtcggtgacgacgtcgcggccctcgcggggcaccttccggctccgctgctccttcccgacccggggggcgtccacgaccacacccgcgaccgaaggaggacgatgacgacgagaatcctcctcgccgaggacatcaaactggtggcagaggccttcgaggcactgctctcggtggaaccggagttcgaggtcgtcgcacgggtggcacgcggcgacgacctggtcacatccgccacccgcctgttccccgacgtgatcctggccgacatcgacatgcccgggatgaccggcatcgaggccacccgaatgcttcgcgacaagggataccgcggcagaatcatcctgctcaccgccctgccgggaagcgggcacctgcacgccgcgatggctgccggagccgacgggtacctgctcaagtcgatcaccgcgccctccctcatcaacgccatccgggcggtgtgcaacggccagtcggccatcgacccgaacgtcgccgcggtcgccatgcgcaagggaccctcgcccctcaacgaccgggaaaccgagattctgcgcctagtcgccgacggttcctccaccgcgcagatcgcctcgcggctgtacctcagcaagggcaccgtcaggaactacctgtcgacggcgatgtcgaagctcgacgccgactcacgcacagcggcggtcacgcgggcacgcgaggagggctggctgtagcaggcgacccgctcagcccaccgcccctcagcccgccgactcctgacgcacggcctcctcgaccgcccggctgagcagggacccggccctgaccatcgacgtctccgggtccggctcgagatcggacaacgcgatgatccggtcgaacgcggaccgtttctcctcgggcaggtcacagcgtccgcacaccgcccagacgggcaccccggcgtcccgggcgatcttgcggatggtgtcgggaagcttgccgagcagggtctgctggtccagccgcccctcccccgtgacgacgagactggaggcggagatccgcgacaccgcgcgggaccatcccaggacgaccgccgcgcccgggcggtacctggtccccaggcacatcagcgcccagccgacccggctgggcggctgcgaaccccctggccaccgcccggcaggcctttcccgaactcagcgaccccttgaaggagtcgacggcaacgatgaccggcgcattcggatcaggacgcatgggatcagcatgtcacgtcgatacggagcagtcgcgccgcctacccctagactcgggggcatggtcaaccgagtctacctgtccctgagcgttctcgccctcgtgctgtgggtggtcgcctaccgtcacatgccgggctgggccgcgggcatcaccctggtgggcatcgtcgtgctgtcgctgtggtgcgagtggtcgcgggtgcgcaccctggccaggatcggcaagtcccgccagcagggcccccgctcctcccgaggacgcaacctgtcgtgagcaatacgattcccgcagccctccaccccggccctgacgaggcc

SEQ ID NO: 429 - DNA, 26620 bp, Propionibacterium acnes
  source 1..26620: mol_type = genomic DNA
ccttgtggacaccacgtcatccacatgacttgtgtcacatgattcccggaccatcatcaagcagatgctcacccaactgtaatgatttctgttctgaatctggacatgctctgacctgcattcaatgatcaattccgtgcgatattccacaacgcacggggaggtcgcagacaatgacaacagaaagcatccccacgcggctgctcgtgtggcacgagcagaccgatccgaccaagctcctcaggatcaccgacgcgatcaggaggggggatccccttccccccatcgaggccatggcgatcggccacagattcctcgtcctcgacggtgcgcaccgggcccaagcccaccagtactgccatcgatctgagatccgagcccgcctccacaacctccccctcagcgcggaaataccaggctggagccactccataccccgcgatgcagcagcgaaactggctcacctactcctccccgtggacgctctcggtcaggcggaaatcgtcctgcacggggtgcgccgtcaggtggggaccgcttcacaacgaccgcgcgacatctttctcgcctgccaccggatcgcgcgagttgcctacgcgcatggaatcagacctctcggcccggagttctccaacgctccgacgatcgacgccgccaccatgacctggcgcccgccgaacgtgggcacgttgtgggccatcgccagcagtctcggacccctgcccgcaactgtgacccggttcgccccgatcctccggcacgacgccatcggggattccgcgatgacacccgtcacctccgccgcgtgacgacccgcgccaattccgccccaccactggatgaggggcagccgcgtggacgatgctcctgttcaggcagggactccatacgagaccaataggaaaatcatgatcaaaaacacaagccctctgaccgtgaaaaatgtctcgaaaacattccgtggctccagcggagaagccatcaaggccgtgcaagacgtgtcattcaccgttgagcgtggtgaggttgtggcattcctcggcccgaacggcgccgggaagtccaccaccatcgacatggctctcggcctcacccgccccgacagcggccagatcgaggtcttcggtactgacccgctcagcgcggcccggtcgggacgctgcaccgcgatgacacagaccggcgggttgctgcccgacctcacgattgggcagaccatggagatcatctcctcgctctatcgtggctcccacatgaatgcctgcatggagcgagcaaggatcacgcatctggccgatcggcaggtgtcgatgtgctcgggaggcgagcgccaacgacttcgcttcgcactggctctgctgcccgatcctgacttcctcatcctcgacgagcccactgcggggatggatgtggaggcgcgccgggacttctgggcagagatccacgaggacacgcgtcgtggtcggacaattctgttcgcaacgcactacctcgacgaggtggacgagttcgccgatcgggtcatcctcatcaaggagggccgcgtcatcgccgacgacacctccgacgcgatccgcaccatgtcggggggttgcaccgttacggcgaccattcccgacttctccctggcacgactgaatctgccgggcacccaactcatcaagcagggcggcgcacgcgttgatctgcaccatcccgattccgatgccctcgcagcgcgagtcatccagctcggcggcaccgacctgcgcgtggtcccccgcagcctcgacgacgccttcctcgctctcacctcaaccaccaaggagtcctgacatgaccgcccaagcgcttcccgcagtcgccactcccaaggcccgccaccgatccgccatctcgctgaagtacttgtggtgcgagatgcgtcgccccttccggcgttcgacgatgctgttcaacctcgccctccccgcagttctgtacctggccctgttccgcaccgtccacaccgccgagctgccggacgggaacttcgcgatgtggatgatgatcggcatcgctgtctacggagcggccactgcgagcaccagctacgcagcctccatctccgtcgacgaggccaacgggtggacccgcaccatccgcctgacgccgttgtcgtcggtcgggtacgtgctggtgaaggtcctctgcgccatggccatcgccctggccccgaccctgctcatcggtctcatcgggctgttgaccggagctcacggcacgctgcgggtctgggtaatcggactgggggcggcttggctcagctcagcaatcttctccgccttcggcctggctctcggactgtccctgcgtcccgaggtcgtcatgcacgtccccggcctggtcatcaccggtctggcgttcctgggcaacgtcttcgtccccctcagcgggacgatgctcaccattggccgctggagccccgcctacggcatcaccgcgctggctcgttacccgctcaccaacggcatcgacatcgggggcggccacgactccctgacggctgccctcatcggcaccttctgctggttcgccggattcgtgttctgggcctcccgtcgatttaccaagagcacgggtcgtcagtgacagattcggccgatctccggaaggagcagtgttatgaccaagcccctcattgcagtggtcaccgcgggccaaggagcgcagaagcctcgcctgctcacgccatggctcaaggtccccggcgtcacggagaagcttgctgcatggtccgctcaggccgatgtggacctcgtcgagctcggtaccagggcgaatgcagaaaccttggcagcgaccgagaatgcgcagccactactggtctgtctcggagtcctcgtctcggatctcctggccgaccagaacattgtgctcgcaggacactccgtgggcgagctgacagcagcgtgtctcgccggggtagttgatcccgggacggccgtcactcttgcacgacggcgtggactggccatggcgcgggcctgcgctctccacccgaccaccatggcggccatcattggtgacaatccggatgacgtcctccggcggctctcggaactgggactcacggctgccaacatcaacggaggcggacagattgttgcggccggctccaccgacgcgatcgcggaactggtggcgacccctcccaacgggaccgcagtcaagccgttgcgagttgctggcgcctttcacaccaagtacatgacgcctgcgcaggacgctttcgcccaagctgctcaagacgtcaccttctccgacccgcagcacccgatcatctccaacctcgacgggcaggagatccggtccggcaatgacctgcgtgaacggctgattgcccaggtgaccgcgccagttcgatgggatctctgcatccagcagatcgcggatcgtcagccggaactcgccctatcggcccctccggggaaggtgcaggcgtcgctcttgtctcggcagatcccggacctcgcgacggtctgcatcaccacaccacgggaggcagcccaggctgcacagcggatcgaccagtccgtatccgtccttcagggggcatgatgctcatccccgagtacttcctcacagcctgttcggaccatgctgagcgcctggcgatcatcacccacaatgacgttgtgacgtgggccgaactggcgactcgcgtcgacggttttcggcgctggctgcgggaccatggcgtgcaccgccaggacagggtcgttctccagacgccaagcaccgtaggcacggtagccctcatgtgggcctgcctgctcgacggcgtgacgatggtcccggtgcaccaggacctcactgcctcccaggtgcagcaagtcatcgacgactgccgtccagctctggtgtgtggcagcccggacctcgtccaactcctcaactcccccggaatgaagacaagcacacctccaacgcggccggagtcaacgagtattctgccgtccttgtcccgggtcagccccgatgaccttgcgatgctcatctatacgtccggcacgacgggtctcccgaaggggatcatgtgtccccaccggcaggtcgccaccgccgcacggatcgtccatgactgtctcgggtaccgcacggacgacgtcattctctgtcgcctgccgttgtccttcgactacgggctctatcagattctgatgtctgccatctccggtagcgcggttgtcctgcgggacggaggcgcgcaggaccgcaacctggtgcgcgacatcgcccgtcacggcgtcactgtcgttccagtcgtgccgtccatggcgtcaatgctcatcaccctgcagcgtcgtgatcagttgccgaccatcgtcagactgttcacgaataccggggcgcgtctggcacccgagaccgcgaaccagttgctcgcaagcttccccggctcccgctatgcgtcgatgtatggcatgacggagtgcaagcgcatctccatccttccggtggaggagtacgagacgcatccggacagcgtgggaagagctctgcccagcactcacgtcgagatcgttgacgctcagggagttccggttccggcgggcgagcacggggagatcacggtgtccggcccgaccgtgatgaacggctactggcaggtgccgaacagtcccagtggacgattccgacccagcggccacggcctcactctgttcaccggtgatcgcggctggatggatgaggagggacgtctctacctcctcgggcgcgacgacgagatcgtcaagcatcacggcatccgaatcagcctgcaggagatcgagatagccgccgaagccgcgccgggcgtcgacgcagtcatcgctctcaagccggcctccgactcggcccccattgaaatcgcctactgcggcagcacgagtcccgagaacctggcccgccatctcgaaaccgtcctggaccgggcgcgacgaccccaattcatccaccaactccagcagatccccctgacccgtaacgggaaaccaaaccggtcagcagccgccgaggccatccgctcaagggcgtgacggcgaaggccaacacccacagacgaaaggaaaccaccatgacccaggccgagttcaaccagttcatcgagtccacctgctccgcgacgatcgtggatcccgaccgtcctttggtcgatcagggcatcgactccctcggaatgctcaccctcatggtcgctatcgaggacagcctcggcatcgaactggatcccgagtccctcgccgacggtaggggttccacgccctccggtcttctgtcccttgtcgagcagccgaaagcgacggtgtgacgacatgacgacgatggttccttgccgccgtgtggagatgccgcaactgttcgaccacatccccggaagcatctctctctcaggagggctgcccgatctgagcgtgctcccgagcaatcagatcgccgaactgacgtcccggatcatgcgtctcggctcaagaatcctcctgcaatactccaccccttcggtctcgtcctccttggtgccggccatcctggacctggcggaacgaacatgcatgtcaccggatccgcggaatctgatcccgaccgcgggttcccaactgggcctggccatggtgatcaatgcctttgacggcgatgagatcatctgtgactgcgccacctatcccggggcgctggccgccttcgcctctgccggcgtggaaacaacgggggtggccagtgacgaggaggggctcaacccagacgcgctcgctcacgccgtcgcagagggtcgggccaatggccgccgcatcgcagccgtctacaccacgcccaccttccagaatcccaccggctccgtacagtccgagaaccgccgtgcggccctgctcaaggtgtgtgctgacaatgacctcctcctcatcgaggacgatccgtacggcatgctgtccttcgacgggcagacgtggccagctctgaagtccatggacccacagcgcgtcatctacctgggcaccttctcgaaggtgttcgcaccgggcgtccgttccggctggatcgatccgcccgccaatcttgtcgagaaactccgcgctgtgtgcgagatcatgacactctcgccatcagccctcaaccaagcgatcatcggcgagtaccaccgtcgtcacggatgggacgaactgttggagggctatcgcgcctcctaccgcgaccgagcccgtctcctcatcggggctctcgaggctgaactggcaagaacgaattgcactggcacgtggacctggcgtgaaccacggggcggcttctacctgtggttggagaacgtcgccagcaccagcggtatcgacgttgcgcgtcgcgccgccgacaacggagtggccgtggtgcccgggaaacacttcgacgcagccggacacgattcgccgagcctgcgggtgtcgttcagcaattcacgcccggctgatctggtcgaaggagctcgtcgtctcgcccgtgcactggtgggagaggacgttcagaaatgactctcgcgacacgcaccgccaccgacaccctgcagcagaccttgccctggggcacccacgaacgtctcgtcttcgggcgggcgctcctgcgcagcaccggcttcccagccgaaggcttggccctgctcgactccgacgacatcctccccctcctcgactcctttcttgccggggacatcgacagaactcacttcgagaaggaatacaccagtcgcgaggagtccggcgcaagggcgctcatcaacgtcttgaaggacgatgcagtatcgcgcgccatcgcatggcagaaccccaccgcgtggaggtccttcgaatccctgtcgtccacgagcggaatcaatgcttcgactcggcgcaaggtacgccaactcgccctctactggcaacgttactgttccaaggctgagaccattggatacttcggcccgttcgcctgggccgaagtcgacccggaggcctctgcggtcgaattcatctcctccgaccatctgatcgaccgttcccacgtcgcaatggaggcgtgggcggtcattgagatcgggaaagccctggcatcacgggccgaccttcagtggtggatgccaccaatcctgtcccccgccgtcgacctcaacatggagagaggcaccgtgacggtggctggacaccagccacgacgggtccgggaggacgaggcacgagttctcttcctgaccgacggcacccgtcccgccgcccagatcgccaagagcctcgacatggagcccgagcggttgcgcaggatcctcgtggcccatgaacgtcgtcacaccgtgatctgggacgccaacatccctgtctcagtgcacgcgtgggacatcctgcacgaacgcattgcccagatcggagacgctgggctgcgagatgaggccactgctgttctcacgaggttcgacgagcttctggaggtcatccgcaacattcccgacgcccggtccccgacggaggcgacggaatccctgtcccgtcttttcgaaaccgtgacaggaacctcttcgaacagacgtgcgggccaggcatatgcagcccgcagcctgtgctacctggactgcacccgcgccggaaccgccaaggttgggacccggcttctcgaagccctcgacgcccccctcaacctcgtcctacaatccgctgactggttcgcggcgaccttggcaaaggaatacaccaccgaaatcacggacctcgcaaatcgaaagcagcgggcctcccaccagccactgaccatggctgatgtctggccgtccacgatgtcgctgttctggggggactcaccgcccccactgcagcgagccgtgaccgaactgtcacggcggtggagcagagtcctcgaggggctgcagccagtcgacggtcgcatcgacacgacatcgtccgctctctcgggcgccgtggacgagcagttccccgtgtgcaccccgattccagaactgtcagtgcacagcccggacctccaggtcatcacctcgagcactagcaacatcgcctccggacgagtcactgcagtcatgggtgagctacatgcctgtctgagcagtctcgacatgccgttgctcgagtggtcgctgccccatggttccattcgcgatcgcatcaacaccgcgctcaacctgcgacgtctggttcccttgttccccgagacatggaggcgcaacaccggccgcatggttccagcgacggtcggagtgggggatcgcgcaatcgggttcactcggacggccgatcaagaccgtgcgaacacatggtcgatgtcggcactgctgttcgagcagaccgaggacggactcatgatccgtgatcccgatggcaggctctggaccatcgcacaagcgtggagcgtgcccatctccatggtcgccgccgatgcgttcaagatcgggctgcccggctcaccagcccctcggctcaccattgacaatctcgtcgtgttccgtcgtacctggaggtttcccgctggctccatcgacatcatgcacggttcagccgccgagaaacacgctcggctgagggagtggcaggtcacgaatcaccttcctgaccacctcttcgtcaagttcccctccgaacccaagccgatctacttctccttcgagtcccccgccatggccacggtcttcacgcgatcactgcagcgcgacgcccgagagaatccagacagtctcgtgacgatgtccgaagcactgcccgagcctcaatcctcatggctgcacgacacccggagccaccactacgtccacgaattccggctgcaactgaccaaggagcgacatgacgaccacagttgagacacatcccgaaacacgtggcacaaccgcgacatccatctccaatctgatcggtcacacccctctcgtaagaatggaccatctgttcgacggcctccccttcgaggtgtacggcaagctcgagaagctcaatcctggcggaagcatcaaggatcgagcagcacaatccatgatcgaacgggcaattcgacggggtgagatcgtcccgggccgtacgaccgtcatcgagtccagttcgggaaatctcggcatcgccgtggcgatactgtgccaggagcacggcctgaatttcatctgcgtaaccgatgccaaggccacgccaacgaacattcgactcatcgaagcgttcggggccactgttgaggtgatcgaagaacctcatcccgagagtggcgaattcctccccatgaggctcaagagggtaagagaactgctgtcagagattccagatgcatggtggccgaatcagtacgggaaccccgacaatccggcggctcacgagcggactgtccgcgagatcatcgaggcaatcccgcgggttgacacgattgtctgcgcgaccggctcgtgcggaacccttcgcggctgccacgaagcattgcgaaagctgtccccacgcacccgactcgtcgccgtggacgccaagggcagcgccatcttcgacgaggcaggagcaccccatccccgctgtgtcccgggacacggtgcgtcagtgcgaccgccgctgtggcgcgcggggctcgccgaccaactggttctggtctccgacgcggactgcgtcgtgggatgccaggaggccctgcgcaccgaggctcttctcctcggcggatcctcgggagcaattctgacggccattcaccgagtgtctcccacgattcccgctggttccaccgtggtgacgatcctccccgacggcggcgagcgctacatcgacaccatctacagccgctcgtgggtcgactcacacatccccgggctgccctctctcgccgactggggggctcccaaccccgccaattcgtatgacctgaacagaagtgcctcatgaagctctacaccagagagaccgtcgaaactgcgcttgtcgggcgtcatggccaggttctcagtgccgtacagagtgcatacatgctgcattcgacgggagagacatcgctgccattctcaaccttcctccgcccggccgggtatccgaacgatcggatcatcgcacttcccgcccacatcggaggcgacttcgacatagccggtatcaagtggatctcatccttcccggaaaacctcgaccggggccagcaacgagcttcctccgtactcatcctcaatagtctggagacgggatacccgaccgccctgctggagtccagtcagatttcagcaacgcgaacggcagcatcagccgccctggccagcgccaccctccatggctccgaagaccatgtcagcacgattggcatcatcggctgcggaacaatcaatcttgcaacgatcgactacctcttccacgtgcacccccagatcaacgaggtcctctccttcgatctgaggcgggagcgggcccatgagttctcgcacctcgtcaaggcttcgcacccagaggcccgggtccgtgtcgccaaggagcccgacgagattctggccgcaagcaacaccatcgcgatcgccacgaccgactcgagtcattggttggaccttccgccgtggcacgggccggggcaccaagtcgtcctgcacacgtcgctgcgagacctgtcagtgccctcgatcctggcagcggccaacgtcgttgacgatcctgatcacgtctgccgtgaagcgacgtccttggatctggcaactcagcagaccggcaaccgggacttcatcacggggagaatcggagacctccttcttggcgcgccgctgtcctcaagtcctgactcccgtgtcattttctcacccttcgggctcggcatcctcgacctcgcagtcgcctccgtcgtcattgctgccgcctcctcttcagcagtcgagatcaatgggttcgaccccgggaaacacgccacaagcatgattgaggtgaatcgatgaccaccacacagatcaacgacaacacggccgttctgcgcgacgtattccccgccggctccgtcgcattcgtgagcggtgcctcacgcggaattggcgctgcctgcgcgacagcccttgcggccgcgggatgcaacctcgccatcacttatcgaaggaaggagaacgaggcggcacaaatcgccgaatccattgaagccatcgggcgccagtgcatcacaatgcagatggacgtaaccgatgagaaccaagtgaccagagccttccgcatcattcgccagcattacggacgcctggacgccgcggtcttgaactcgggaatcaccagtgacgggcatcttgcaacaatgagccgctccaagtggagctcggtgatcgacacgaatctgaccggaaccttcctctgcacgcgcgaggcgaccaaggccatgtactcgtccggtggctcgatcgtcatggtcgcgtccaccagtggagttgcagggcgaccgggccaggccaactacgcagccagcaagggcggaatcgttgccatgatgaagacgctggccccggaggttgcggcaaagaacgtccgggtgaatgcggtggcacccggcttcattcagaccgacatggtggcggccgttccaaaagcggcactcgcccaggcaatccaacacatccccatgggccgtcttggcctggcacaggaggttgcgtcagccgttaccttcctggcctccccgctcgccgcctacatcacagggaagaccctcactatcgatggcggaatgatcaacggctgaccccaggacccgcacacccccagtaccgagaaagaaacaacaatgaccgagatcacccacactgccaacagcatccgaacccgcgccgaggaacgttccaacaaagcttggcgcctgaaggaggagatcatctccaagctcggtctcgagaccaagccagaatatgtctcggacaaccaaccgctcttcggacgtggccttgagatggattcccttgacactctcgaagtcgtcgtcgccgtcaacaatgagttcggagtctcggtcaacgacgacgacgtacaggcgttcggctcgatcaatgccatggtcgatttcatcgaggtgaacgagaagtgagttctcttgcgctcgaggcgccacccaaggacgcccgtaagaaattcgcctacgacagcgatgccatcaagacgatgctcccacatcgttggccgatgctcatgattgatcgcgcctacgacgtcgtcccagggaaatcgggcaaaggcatcaagtcggtcagcgtcaatgagccgttcttcgccggtcactaccctgaccattccatcatgcccggcgtcatgatcgtcgagtcgatggctcaactcgtggccgtcatctacgtagccgaggccattcagaacaatcccggcatgacgtcgcacgacgcacgttcaagcgttggttatctcggcgcgatccgtcagatgaagttccgacgcctcgtcactccgggcgaccaactcaccctccacgcccagctcggcgagaaagtgggggctctgcgcgaggtttccgtgagagcactcaatggccgggatgtcgtcgcccagggggaactcgtcgtcaccgagcggtgacacccagccacacacgagaaggaagtcccatgatcgttcgcccctacaggccacgtgatgcggaagcgatcgtacatctctacaacagccattccgactcccccaatccagtgtcgggagggattgttgaggaggagttccagagggagctcgaagaacgtggttcgacagtgttcctagtggccgaggaggccggatccattgtcggcacattcgggatgttccgcacgaatggccgacacaccatggccgatgatgaagtcttcgccgacatgttctatgtcaccccgtcacatcgactctcgacagttccgggacagctaatcactgaagccatcagcgagtgcttcatccagggcatcaacgtgatccgcctcaccgtgaaccccgcgaacatctccgcgctcaaggtttacagaaaagtcggttgtgcctgtctcggggccaccgatgcaggcgaggacgggaacattgagctgtacaacttcatccctctggttcttagggcaaccatcaccaaactcgaccacgattgtattcgagccctggcggacatgacttcgttcgcctgcatcaccgagggacgtccacttgatctgtcccacgacttcatcgtggacgctggacggaagatcgtctcccacagcatccagatcgggcgttcaaccatccacgccatggtcgacacgggctcgaggaccattgtggaggccaccctcgacaaccgcgactgggatgctcctcgccagatcgtcgcccccaccccctgtcagaaccggcccgaggaacagcgaggcaaccctgtccggctggtgcacaagaagcttgaggtcaccttcaacgaaggagtcattgagatcagtacgactggccactggggcccggtcctcgcaatgtcctggccctcctccgtctcgcaccgcgctcacgggtggcgacagggccccgccaagtcgtatcgatgcgagcttctcgagaattgcctcgtcctggatgacgaaggaggagtgaaatgcaccatcagcctcaatgattgccaagtcgcgatccggatggatggtgccccaaaaacggaattgagaatgtaccagtggtgcagcctgcgccagggctatctgacggctgacaccggcatcacgagcttcaaccgggcatccagtgggctcggagtcgccgtccgggactcgtccgagattgtcgccgcgggccttcccgtcatccctgacacaccgatcacatggagtgagggtgacatcacggttcagctcgatccctgcggccgcgcctccctgatccactcgaccctggtggaccgaagaatccacttggacgagtctggctcggcaagtctcaccatgaccgtgtttggtgattcccagccccatcgtgccgacaccgtcgagctgcctcccctcgcggcaggcaccgacaggatcgtcctcaagccggctgccggaggcgtgaccacatggcgcttgggcgccaccaaggtgctcaagtcaccgtggccacacgcccgcgcgctcgggcccaatccgatctggcgagccggcctgtgggtcagtcacgagccggatcgccacgaccgtcgccaaggaatggggtggggtcccgatcatcgcagttggaccctgtcggaagacaccatgaccagtactgacgggacactctcctggcgcttcagcggctcccccgacaccggctggacggtcgacgtcacgacgagcaacacgcacggggagaccgtcgtctggctcaccccggactgcccggcgggcgagaggatccgcacgtctgatcatgccgtgacgaccatgcttgacatctcgaagccatggcagcgctggaccacccgatgcgcaattcctctcagacacgggaagtggttcctcatcgagcctgatcatgacctcactgattcccccgaaatcctcatgcgctctgttcacggggtcctgctcgtcggctgtgtcggacgagcccactccggatccgcttcctggcgctttgccatcacgtcagaactccccacctccaacccaagaagaaacgactacacctcagccgcctgaacccaaccagttggaacacccactacagaagaaatggagcaccaccatgtccatcactgagcagtacaagacccttcgcacctcggtcggcctccacacgcctaccggtcccctggtccgtatcaccggtgatgatcgtctcgagtttctcgacaccttcctgtcccgcgcctcggacttcgtggaccccgacaccactcgggagtgcctcgctctcaccgaggacggccttccgctgacgatcttcctccacatcgagcgcgaggaggagtcatggctccttccccgcaccgccatcgatgcggcgaccctcgccacgtacctcggcaacctcgagaccgatggtgacctgtcaatcgagattgctccagagggttggggagctgtcgctgtcgaggggccgctgtcgtggcagatcgccgaaaaccttctcgacttcgacgtggctggcctcgttcttcacgccgtcacggacgtcgtcgttcccggggcccccgagggatcgaaggcatggctcgcccgggtcggaaccactggagagtacggctacctgctcgtctccaacgttcccgacctcgcccgcacttatctcctcagccgcgccacggagctgggcggtcaggcagtcgacgccgatgctctcgcacgagtccaggccgaggccgggatgccctattacgcgatgggcgtgtgccacctcgatgtcgccgggggtgacctcgcctggctcgtggactggcagcgcatcggcgagttccaaggatccgagaatctgcccacacccgtccgagaccagcgccgactggccgccatcgccctgcccaccggcaaccgcccggaagctggtcagaccgtcgctgccggggatgaggagattggaatggtggtgtacgtcaccccgtccgccaatcccgatgaggaactcgcgttcgcacttctggatgctcctttctggactcccacccttccgttgaccgtcggtgcccacgacgggaccacggtcaccctgccccgcgtcgtggcagcctccagcctcaacaagctggggtgacagcgatgacgatcactgctgagaacgccaccacccgcagcgacattgcccggagcattgcggtgaccggcgtgggactggtcacggcacagggtgaccataccgacgagtgctggaccgaacttgtcgatggggtttgcggaatcaccatgaacgtcacgttcgatgactctggcaccacgattccgtgtgctggcgtggctcccattccgaactctgattcgatcgaccgctgttacctgctcggcgtccatgccatgcgtgaagctctcgagatgagtggcatcgacctggactccgtgggtcgtgatcgcatcggactcgtggtgggctcaagcctcggcgcgatgcccaccttggaggcggctcatcgccgggccattgagaccggcgtgctcgatgccggattggcggcagactcccagctccactgcgtcgccgaccacctcgccgctgagttcgacatccgtggaccccgcgtcgtgacatcgaatgcgtgtgccgctggtgccgtggcgatcggctacgccgcagaactcctctggtccgacgatgtggacctggtcgtctgtggcggtgtcgatccactggcccagatctctgccaatgggttcacgtgcctgggagctctcgacaatctcccatgcagcccgatggccggttcctccggtctgactctgggcgagggagccgggttcatggtcctcgagagaacagatgcggcggctgccagaggccaggaggtgatggccgaaatcgccggctacggcacaagttgtgatggttaccaccagactgccccggacccgggtggcaatggcgcccgcagctcaatggaggccgccctgcgctcagctcatctcaagccgtccgacgtcagctacgtcaatctccacggcaccggtactccgaccaacgacgccgtcgagccgaaggcactccggtcattgttcaagtccgatgaccttccccctgtcagttcggtgaagggcgccatcggtcacactctcggcgctgctggcgccatcgaggccgtgtgctcgatcaaggccatccacgagggggtcctgccgccaaccgtcaacaaccgcgggcaggcttcccgaactggtctcgacatcgtgccggagtgcgcacgcaaggccgctcccgacgtggtcatctccaactccttcgccttcgggggcaacaacgcatcagtggtcatcaccgcacctcgaggaggcgttcactgtaccgccccggcgcagcttcgcgaggtcggaatctcaggaatggcagctctggcgggaaaggccgccaactcggaggagcttctttcggccctgtcagaagattgtccaatctggatggccgatgagaagacctgggaaggggatgctgtccaaaccggccatgtggacatcaagcgcctgtcccgcacaatcaaaacgaaaaaggttcgtcggatggaccccttgggaatcatctccagcgcggtggtgactgatctgtatgcccgacacgggaagctgagccgcaaggatgccgaaagcacgggaatcatcttcgcaaccggctacggtcctgtgacggcggtgacgcagttcaatgacgggatcatccgccacggttccgagggtgccaacgccctggtgttcccgaacaccgtggtcaacgcagccgcaggccacctcgcgatgctgaatcgctaccgtggttacacggccaccttggcatgcggtggaaccagttcactcatggcgctgcttctcgctgctcgcgtcgttggccgcggcgctgcggatcgcatcatggtcgttatcgctgacgagtttcccagcattgccgtccaggccgtcgcgaagcttcctggctaccgacacagggttgatggttccggagccgtgctctcggaaggcgcggtatgcgtcctggtggaggccgtcgaagtcgccgaagcacgcggtaccgcccccatggcgctgctacgcggcttcggatcccgtggagagtccgtgggagtcggtcacaccgcatccgatggacgggcttgggccaaggccatggccgctgcactgggcccggccggcctgactgcctccgacgtgtcgaccgtcgtggcggcatcaagcggacatcctcgcgtcgaccgagccgagcaggcggccaggcggatcgtcggactgtccgcaaccgctacgaccttcccaaaggcgattgtcggagaaacacacggatcggctgccgggatcgggctgttcggtgccctgtgcggttcgaggtcagccgcgcaccagaacatccttgtcaacgccttttcccacggcggtggttatgcctcgatggtggtggagtcactgtgaccacgacgcttctgccacgggttgcccagccgggaccgggcgtcagccatgtcgacaccgaccgtcccatcgagtgcatcatcacccaccacccccacatgccgcgtgatcgcggaggccacgccacctccgtgtcaggcaggtacttgctgcgccaagccgcagaactcatgctcggcacggatcctgcgcattgccccgtcgtcgacccttcgcggcgctggtactggcccggaatcaatcttcacggttctgtctcccatgtcccgggctggagcctgacgacgctgagcaccggcggccacatcggggcagacatccaggacttccgggagcgtcccggcgcaatggcattcatcggtgacctggtcaagctgtcgcgatcggcgtcactccgagaattcgcggagtgcgaggccgtcgtcaaggtgtccgaattgactaaggagacgttcgggcacgtgcgactgcccgaatggacacccggatggcgccacgttttcgaggactactgggtctggagtctcgagatgcacgggatgggagtcatcgcactcgcatccgatctcccccgagccattcgctggtggcggtgcgacgccgatgcccgtggccgtctccaggctctccgacccataagcagtcttggaccaggaaggccgtcatgagccggtactcacgtcgaatctcaggcatcgaacgcggctatctcaacgccgcaacccggggcccgcaccccaccatccacacgatgatcgacttcgagggccgcgtccccgccgactgttggcggcacgcatccacgattgcgtcggccgccaaccctggcatgacagtggtccggaggtcgggccgatggacatccgatccagcgggctgtccggttgtgttccacgactggaccgcggaccccaacgacgttgccgacttccacgctgacatggatctcgtgacgggaccatcgtccacgctccacgttttcgagggggcggaacgcacccgaatcaccttggcagcaagccatgccgtgaccgatgggcggggcatcgaacgatttctcgtcgacctgcttgcagcgttggacgagcgtgaacccattggaagccccgacaccctgaccgatgtcgatatcaaacgatccttggagaacagcatcaagccccgacgccacctggccgctgtgcccgccgatgtcctttctccactgggggggaggaagaaccaacgtatatgggcctccaggacgtggcacagtgccccgggagccatgagcggaagaatcgctgccgctgtggccgagatgatcgaccacgccgcaatgatcatcatcccggttgacatccggcggcacgtcccagaggtccgatccacagcaaacctaagtgcccaactgccagtgatcatcaccccgaaccagcgctggcaaagcatccatgggcatctgctcacggaccttgctcgccatcgagaccttgcgatcatcagtgaggatttccgccacaacaatccgttcgcatcgaccttggaggaaagccaggccatcggcctcgatggtgtctatccctgtgccgcaatcatctccgaccacgggaagctcgacctttcaaggttccagaccttggaactcaccccggtctcgatgcgaagcctcccgatgctcgttccctactccgcaatgttcatcagcagttgcaccgtcggcgagaccaccactgtcaccatcgctcatcgcgctgatgacgatcccgattccataaacaccttcttccaccacatcgaatcccagatgtccatctgagccacgtcgtccctggagagcaaacatgaccacccaaaatgtcatcaccccgccgcgccccgtcacctcccatgccacggcgaccaggtccgaggctccaccgcgaagcgtcatcagagccatggccatctcgatggtcgcgaccctcatggtcatgctcgacacgaccgtcgtgaacgtgtccttgagcgcgaccaccgcccgcttcgggagcatgggcagcgtgcagtgggtcctcacaagttacctacttgcactgtgcgcgacgatgacggcctccgcctgggtcatcgaccgccttggtccacggctcaccttcatcgcctcaatgaccatgttcctcatcggctcggtgatgtgtgcactgagcgattcagtgtggcaactcgtcactggcaggaccatctccggtgccggagctgggatccttgttccgacagcatccgtcctgcttatccgtggcatcccacgcgaacaacttggcagggtgcaggcactgaatgggagtgtccagttgatcgctcccctgatcggcccgactgtgggcggtctcctcgttgacaggtgcgggggctggccggccatctactgggcgaacgtccccgtagctcttgttcttctgattgaggccgtccgcgtcgatccggacgaaccacacaccgctaagcgccgcctcgatgctctcggcctggtctgtggcagcaccgcgatcgtgctgacagtgcttggtgtctcactcttcggcaggacgtcgcgaaacaccaccttcctgcttacgatcggcgcgcttgcagtcctcgcatgggcgttcttcatcacccacatccgaagggctaccaaccctctgcttgacgtttccctgtatcagaaccctgtctattcatggtccagcttcaacgtagcggtgcttggtttcggtctctacgcccccatggtcgtcatgcccctctatctcgaggcgacgcgccacctcactgccgtccacactggtctggtgatgtcagtggccggcgtcggcgtcattatggccggaatcctgtgcacgaagatcatgggccggatcggtggaggcctcacgatgacagttggcataactctgagcatcatcgccactctgcccctggtccggctgacgaaccacacctcctacatactcctggcagtctgcttggccttgcgtggagcaggaatcagcctgacaatcgtcccagccatgacacgggccttcgagtccatcaagaggacggccatggcggacgcctctgcacagctcaacctgttgcagcgaatcggcgggacaattgcgacagcagtcatcatcgcagttatccaccacgaggccatgctcacccgcggactctcccccacagtgttctcgcacgccaacgtgtggatcctcaccgcgaccgccgtcacccttctgccggccttcgcgcttgcgaaggccgaaagacaacagcaggatctctgagcaccgaggagtactccctcgtagaccctcctctgatctaattgggttcgttccaagtgtgtatctcactccggggagccccgattgctgaaccacatcccgttcaccctggcgagtccctcgtggtacgacgtcccctgggcgcccggatctccgtatctcacaggagatatctcggtcctgccagcggactcgccaaggtggacgacgaccatccggggtccttggcaaatccacatgccacctcgtccgacccttccagaggtggggtggaaagtgcatgtgtctgccaagccatcggaattggaatcggttgcctcagtcgtagcactgtggtgcgtacgccacagcgtccccttcaaagtacttcgcacccgaggtctcgttcacgcgagtcaagtcaagtatgcggaccgaagtcagagcggcaaggtctgcacctgctaccccgacggcgagagccttgagcacttctgctccggtcttgccgagctgcttcagaacgtcgattcacctccggtgtccggcgagctgcgagtcggatcctcccctctgtggttgcgtcacgggagtttccgagaggcatgggcggtgtcatccacaggagtaccgttcccggtctacccgggaacaacacatcctgatcgtcgaggccccgcgcccgcagaatccgatcacgacacgccgtggatccggaggctccgtcggacgaatcgccccagcacggttcttcccatcgacgatgtcagactcctccaccgatcaaatgctggcggcgtgtatcaggcaacatggagagacggcacatcggtagtcgtcaaggaggcccggcacctgtccggacttgatgcggcgggtgtcgacgcccgagtgcggctgcgtcacgagtacgaggccctgagaagactggacccctatcgggccgctccccatcccattgatctcattgagaccgaggacggctcgttcctgatcatggaattccttgacggaatgacagtccaccaggagatgtcgaggttccatcctctgattagtaggcgacctcatcggctatcgatgaccgatttttcacgctggtgccgagaggtcgaagatcgcttgaggaatgtcacgagggtcatggccgggtgcggaatcgttcacggggatcttcatcccgcgaatctgatacatgtcggccatgaggttttggttactgactttgaatcctgctcaatcgacggggtcgccgtctcgtcagggatcgccgctccctggttccagtcggacgacacgattcccgatccggcgacgactgacgatctccacactcttctcgtggatccgacttgcggccccgcgcttgtcccccatccaaatcttcgcgcgctcatcagccaggccgcagtcgaggacatgatgggaaatccgactggtttaccacatgcctggaacctcgaggacatgacaagcgaactcgccaaggggatccgggcatcagccactcccgcacgagccgaccgcctctttccctcagacccctacctgttcgggcatccaggttcagaattcggcctgatgcatggcgccgccggaatcatggctgctcttgccgtgactgggtacggtgttgacgcgaatcacgtgacctggatgaaggaccgcttggccacccgcccgaccctgctgccggggttggccaacggaatcgagggaattgccctgggtctctccctgtgcggtcagaacgacatggctgcatccctgctccaccagtccggaattctcacgatcacaacgaacggatcgactgacctcaccctcggtactggtatggcgggccgagcgtgcgcgctgcagtccctctcacaacgactgtcatcgaaatctctcgcccacgctgcatataccctctgggaacaactcgccgtggctgtgcggaacactgatgtggccttgccgaacggcctgttctccggttgggagggaatcgggctctccctgcttgcctctcccctgccggatcgtcatgatctcgcccgccactcactccgactggccctggccacgacaacgattgttgacggtgcgctcttctcaggcgagggacagatccgatggccatatctggggcgtggtcccgcggcatgtggcccgctcgccgccaggcttgatgatgaccagacggccaaggccgtggcacagacctgtcgttgtcccctgactgagtcatccggtctccacaatggccgcgcaggtctcctactcgtcctccgccagctcgtgggagaccaagacgacgccgttcgccgccacctcatgagactgtcgtggtcgatggaccgtcgcgaggaaggcacattgctgctgggtgatcatggcctgcgtttctcatccgatctcgcgacggggtcagccggcgccctcctcgccctgagcagggacccatggcggaacatgacacgaatgctcggaatatgcgatgacacctgtcatggcccactagtgacagtttgatctagcgccgatagttcacaactgaaagactccaaacatcgaggaaaacatgctgagccaaaacgccttggcaggcgtggctcgtttcaccacgatgaacaccaggagacagaatgtccgttgaggccatgcaatccatcgagatggacgaggaaaacagcgccagccagacagtttgcgcttgttacagcttcttctcgtggtcaggatgctgcgtagtctcccaagcggtggaagcatcttgatcgtgtgagacaccgtcgactaccctgtcccccgtggtacgcacacgccccgtcctggacagtcccggaagaccgctcatcgcctccggagtcgtcctggcggtcctgctcatcatcgcggtgatgacgatggtgcttcagcgcgaccccactctcacccccggacgccgcattctcggtatcgtcctgtccacggtccaggccgtcggattcatgtggctgcagacccgcatggttcgtcacggcaagggttcgcgcaacatgcgtgcgacccttggaagggtcggtttctgggccacgtggggactcgtcgcagtgggagtcgtcaatctgtggctgaccaactcgtggaccctcttcggggcctccgtcgccacgcccctccttctcctgccaggggtgtggagtgtggtggccaccctcgtgaccctgatcgtcggtttctccgacctcgtggtcacccacacctcgccactgacctcagccacggtcgtgctggtgaccatcgcggtgtcggtgaacctctacgcattcacgaagctgtcgacggcactcgttgaactccgctcctcccaggaggagatcgcccggctgcgcgtggacgccgagcgtcaccggatatcgcgggacctccacgacatcatcggtcgcaccctggtcgccacgtcgatgcgccagcaggcggccctccacctcgtcgaccgcgacccgcaacgggccaaggaacagctcgacgccgcccatgacgcaatcaccgaggggcagcaccagttgcgttccatcatccaggccgagatgagcaccagcctccccgacgagatcagcgacgccacattcctgtgcgaccgactccacatcgacttccgcatggatgaccgcggcagaccgcacaaacccttcgactcggcggcggcggcggccctgcgcgagggaatcacgaacatgctcaagcacagcgcggcgggctactgccacgtcgccatctccccggacctcctgaccgtcaccaacgacggttgtccgcaatcacctcgcccctccaccacaccgggcaccggaatcgaccatctccggtcccagatcgaggcgctcggtgggtcggtgacgacgtcgcggccctcgcggggcaccttccggctccgctgctccttcccgacccggggggcgtccacgaccacacccgcgaccgaaggaggacgatgacgacgagaatcctcctcgccgaggacatcaaactggtggcagaggccttcgaggcactgctctcggtggaaccggagttcgaggtcgtcgcacgggtggcacgcggcgacgacctggtcacatccgccacccgcctgttccccgacgtgatcctggccgacatcgacatgcccgggatgaccggcatcgaggccacccgaatgcttcgcgacaagggataccgcggcagaatcatcctgctcaccgccctgccgggaagcgggcacctgcacgccgcgatggctgccggagccgacgggtacctgctcaagtcgatcaccgcgccctccctcatcaacgccatccgggcggtgtgcaacggccagtcggccatcgacccgaacgtcgccgcggtcgccatgcgcaagggaccctcgcccctcaacgaccgggaaaccgagattctgcgcctagtcgccgacggttcctccaccgcgcagatcgcctcgcggctgtacctcagcaagggcaccgtcaggaactacctgtcgacggcgatgtcgaagctcgacgccgactcacgcacagcggcggtcacgcgggcacgcgaggagggctggctgtagcaggcgacccgctcagcccaccgcccctcagcccgccgactcctgacgcacggcctcctcgaccgcccggctgagcagggacccggccctgaccatcgacgtctccgggtccggctcgagatcggacaacgcgatgatccggtcgaacgcggaccgtttctcctcgggcaggtcacagcgtccgcacaccgcccagacgggcaccccggcgtcccgggcgatcttgcggatggtgtcgggaagcttgccgagcagggtctgctggtccagccgcccctcccccgtgacgacgagactggaggcggagatccgcgacaccgcgcgggaccatcccaggacgaccgccgcgcccgggcggtacctggtccccaggcacatcagcgcccagccgacccggctgggcggctgcgaaccccctggccaccgcccggcaggcctttcccgaactcagcgaccccttgaaggagtcgacggcaacgatgaccggcgcattcggatcaggacgcatgggatcagcatgtcacgtcgatacggagcagtcgcgccgcctacccctagactcgggggcatggtcaaccgagtctacctgtccctgagcgttctcgccctcgtgctgtgggtggtcgcctaccgtcacatgccgggctgggccgcgggcatcaccctggtgggcatcgtcgtgctgtcgctgtggtgcgagtggtcgcgggtgcgcaccctggccaggatcggcaagtcccgccagcagggcccccgctcctcccgaggacgcaacctgtcgtgagcaatacgattcccgcagccctccaccccggccctgacgaggcc

SEQ ID NO: 430 - DNA, 26620 bp, Propionibacterium acnes
  source 1..26620: mol_type = genomic DNA
ccttgtggacaccacgtcatccacatgacttgtgtcacatgattcccggaccatcatcaagcagatgctcacccaactgtaatgatttctgttctgaatctggacatgctctgacctgcattcaatgatcaattccgtgcgatattccacaacgcacggagaggtcacagacaatgataacagaaagcatccccacgcggctgctcgtgtggcacgagcagaccgatccgaccaagctcctcaggatcaccgacgcgatcaggaggggggatccccttccccccatcgaggccatggcgatcggccacagattcctcgtcctcgacggtgcgcaccgggcccaagcccaccagtactgccatcgatctgagatccgagcccgcctccacaacctccccctcagcgcggaagtaccaggctggagccactccataccccgcgatgcagcagcgaaactggctcacctactcctccccgtggacgctctcggtcaggcggaaatcgtcctgcacggggtgcgccgtcaggtggggaccgcttcacaacgaccgcgcgacatctttctcgcctgccaccggatcgcgcgagttgcctacgcgcatggaatcagacctctcggcccggagctctccaacgctccgacgatcgacgccgccaccatgacctggcgcccgccgaacgtgggcacgttgtgggccatcgccagcagtctcggacccctgcccgcaactgtgacccggttcgccccgatcctccggcacgacgccatcggggattccgcgatgacacccgtcacctccgccgcgtgacgacccgcgccaattccgccccaccactggatgaggggcagccgcgtggacgatgctcctgttcaggcagggactccatacgagaccaataggaaaatcatgatcaaaaacacaagccctctgaccgtgaaaaatgtctcgaaaacattccgtggctccagcggagaagccatcaaggccgtgcaagacgtgtcattcaccgttgagcgtggtgaggttgtggcattcctcggcccgaacggcgccgggaagtccaccaccatcgacatggctctcggcctcacccgccccgacagcggccagatcgaggtcttcggtactgacccgctcagcgcggcccggtcgggacgctgcaccgcgatgacacagaccggcgggttgctgcccgacctcacgattgggcagaccatggagatcatctcctcgctctatcgtggctcccacatgaatgcctgcatggagcgagcaaggatcacgcatctggccgatcggcaggtgtcgatgtgctcgggaggcgagcgccaacgacttcgcttcgcactggctctgctgcccgatcctgacttcctcatcctcgacgagcccactgcggggatggatgtggaggcgcgccgggacttctgggcagagatccacgaggacacgcgtcgtggtcggacaattctgttcgcaacgcactacctcgacgaggtggacgagttcgccgatcgggtcatcctcatcaaggagggccgcgtcatcgccgacgacacctccgacgcgatccgcaccatgtcggggggttgcaccgttacggcgaccattcccgacttctccctggcacgactgaatctgccgggcacccaactcatcaagcagggcggcgcacgcgttgatctgcaccatcccgattccgatgccctcgcagcgcgagtcatccagctcggcggcaccgacctgcgcgtggtcccccgcagcctcgacgacgccttcctcgctctcacctcaaccaccaaggagtcctgacatgaccgcccaagcgcttcccgcagtcgccactcccaaggcccgccaccgatccgccatctcgctgaagtacttgtggtgcgagatgcgtcgccccttccggcgttcgacgatgctgttcaacctcgccctccccgcagttctgtacctggccctgttccgcaccgtccacaccgccgagctgccggacgggaacttcgcgatgtggatgatgatcggcatcgctgtctacggagcggccactgcgagcaccagctacgcagcctccatctccgtcgacgaggccaacgggtggacccgcaccatccgcctgacgccgttgtcgtcggtcgggtacgtgctggtgaaggtcctctgcgccatggccatcgccctggccccgaccctgctcatcggtctcatcgggctgttgaccggagctcacggcacgctgcgggtctgggtaatcggactgggggcggcttggctcagctcagcaatcttctccgccttcggcctggctctcggactgtccctgcgtcccgaggtcgtcatgcacgtccccggcctggtcatcaccggtctggcgttcctgggcaacgtcttcgtccccctcagcgggacgatgctcaccattggccgctggagccccgcctacggcatcaccgcgctggctcgttacccgctcaccaacggcatcgacatcgggggcggccacgactccctgacggctgccctcatcggcaccttctgctggttcgccggattcgtgttctgggcctcccgtcgatttaccaagagcacgggtcgtcagtgacagattcggccgatctccggaaggagcagtgttatgaccaagcccctcattgcagtggtcaccgcgggccaaggagcgcagaagcctcgcctgctcacgccatggctcaaggtccccggcgtcacggagaagcttgctgcatggtccgctcaggccgatgtggacctcgtcgagctcggtaccagggcgaatgcagaaaccttggcagcgaccgagaatgcgcagccactactggtctgtctcggagtcctcgtctcggatctcctggccgaccagaacattgtgctcgcaggacactccgtgggcgagctgacagcagcgtgtctcgccggggtagttgatcccgggacggccgtcactcttgcacgacggcgtggactggccatggcgcgggcctgcgctctccacccgaccaccatggcggccatcattggtgacaatccggatgacgtcctccggcggctctcggaactgggactcacggctgccaacatcaacggaggcggacagattgttgcggccggctccaccgacgcgatcgcggaactggtggcgacccctcccaacgggaccgcagtcaagccgttgcgagttgctggcgcctttcacaccaagtacatgacgcctgcgcaggacgctttcgcccaagctgctcaggacgtcaccttctccgacccgcagcacccgatcatctccaacctcgacgggcaggagatccggtccggcaatgacctgcgtgaacggctgattgcccaggtgaccgcgccagttcgatgggatctctgcatccagcagatcgcggatcgtcagccggaactcgccctatcggcccctccggggaaggtgcaggcgtcgctcttgtctcggcagatcccggacctcgcgacggtctgcatcaccacaccacgggaggcagcccaggctgcacagcggatcgaccagtccgtatccgtccttcagggggcatgatgctcatccccgagtacttcctcacagcctgttcggaccatgctgagcgcctggcgatcatcacccacaatgacgttgtgacgtgggccgaactggcgactcgcgtcgacggttttcggcgctggctgcgggaccatggcgtgcaccgccaggacagggtcgttctccagacgccaagcaccgtaggcacggtagccctcatgtgggcctgcctgctcgacggcgtgacgatggtcccggtgcaccaggacctcactgcctcccaggtgcagcaagtcatcgacgactgccgtccagctctggtgtgtggcagcccggacctcgtccaactcctcaactcccccggaatgaagacaagcacacctccaacgcggccggagtcaacgagtattctgccgtccttgtcccgggtcagccccgatgaccttgcgatgctcatctatacgtccggcacgacgggtctcccgaaggggatcatgtgtccccaccggcaggtcgccaccgccgcacggatcgtccatgactgtctcgggtaccgcacggacgacgtcattctctgtcgcctgccgttgtccttcgactacgggctctatcagattctgatgtctgccatctccggtagcgcggttgtcctgcgggacggaggcgcgcaggaccgcaacctggtgcgcgacatcgcccgtcacggcgtcactgtcgttccagtcgtgccgtccatggcgtcaatgctcatcaccctgcagcgtcgtgatcagttgccgaccatcgtcagactgttcacgaataccggggcgcgtctggcacccgagaccgcgaaccagttgctcgcaagcttccccggctcccgctatgcgtcgatgtatggcatgacggagtgcaagcgcatctccatccttccggtggaggagtacgagacgcatccggacagcgtgggaagagctctgcccagcactcacgtcgagatcgttgacgctcagggagttccggttccggcgggcgagcacggggagatcacggtgtccggcccgaccgtgatgaacggctactggcaggtgccgaacagtcccagtggacgattccgacccagcggccacggcctcactctgttcaccggtgatcgcggctggatggatgaggagggacgtctctacctcctcgggcgcgacgacgagatcgtcaagcatcacggcatccgaatcagcctgcaggagatcgagatagccgccgaagccgcgccgggcgtcgacgcagtcatcgctctcaagccggcctccgactcggcccccattgaaatcgcctactgcggcagcacgagtcccgagaacctggcccgccatctcgaaaccgtcctggaccgggcgcgacgaccccaattcatccaccaactccagcagatccccctgacccgtaacgggaaaccaaaccggtcagcagccgccgaggccatccgctcaagggcgtgacggcgaaggccaacacccacagacgaaaggaaaccaccatgacccaggccgagttcaaccagttcatcgagtccacctgctccgcgacgatcgtggatcccgaccgtcctttggtcgatcagggcatcgactccctcggaatgctcaccctcatggtcgctatcgaggacagcctcggcatcgaactggatcccgagtccctcgccgacggtaggggttccacgccctccggtcttctgtcccttgtcgagcagccgaaagcgacggtgtgacgacatgacgacgatggttccttgccgccgtgtggagatgccgcaactgttcgaccacatccccggaagcatctctctctcaggagggctgcccgatctgagcgtgctcccgagcaatcagatcgccgaactgacgtcccggatcatgcgtctcggctcaagaatcctcctgcaatactccaccccttcggtctcgtcctccttggtgccggccatcctggacctggcggaacgaacatgcatgtcaccggatccgcggaatctgatcccgaccgcgggttcccaactgggcctggccatggtgatcaatgcctttgacggcgatgagatcatctgtgactgcgccacctatcccggggcgctggccgccttcgcctctgccggcgtggaaacaacgggggtggccagtgacgaggaggggctcaacccagacgcgctcgctcacgccgtcgcagagggtcgggccaatggccgccgcatcgcagccgtctacaccacgcccaccttccagaatcccaccggctccgtacagtccgagaaccgccgtgcggccctgctcaaggtgtgtgctgacaatgacctcctcctcatcgaggacgatccgtacggcatgctgtccttcgacgggcagacgtggccagctctgaagtccatggacccacagcgcgtcatctacctgggcaccttctcgaaggtgttcgcaccgggcgtccgttccggctggatcgatccgcccgccaatcttgtcgagaaactccgcgctgtgtgcgagatcatgacactctcgccatcagccctcaaccaagcgatcatcggcgagtaccaccgtcgtcacggatgggacgaactgttggagggctatcgcgcctcctaccgcgaccgagcccgtctcctcatcggggctctcgaggctgaactggcaagaacgaattgcactggcacgtggacctggcgtgaaccacggggcggcttctacctgtggttggagaacgtcgccagcaccagcggtatcgacgttgcgcgtcgcgccgccgacaacggagtggccgtggtgcccgggaaacacttcgacgcagccggacacgattcgccgagcctgcgggtgtcgttcagcaattcacgcccggctgatctggtcgaaggagctcgtcgtctcgcccgtgcactggtgggagaggacgttcagaaatgactctcgcgacacgcaccgccaccgacaccctgcagcagaccttgccctggggcacccacgaacgtctcgtcttcgggcgggcgctcctgcgcagcaccggcttcccagccgaaggcttggccctgctcgactccgacgacatcctccccctcctcgactcctttcttgccggggacatcgacagaactcacttcgagaaggaatacaccagtcgcgaggagtccggcgcaagggcgctcatcaacgtcttgaaggacgatgcagtatcgcgcgccatcgcatggcagaaccccaccgcgtggaggtccttcgaatccctgtcgtccacgagcggaatcaatgcttcgactcggcgcaaggtacgccaactcgccctctactggcaacgttactgttccaaggctgagaccattggatacttcggcccgttcgcctgggccgaagtcgacccggaggcctctgcggtcgaattcatctcctccgaccatctgatcgaccgttcccacgtcgcaatggaggcgtgggcggtcattgagatcgggaaagccctggcatcacgggccgaccttcagtggtggatgccaccaatcctgtcccccgccgtcgacctcaacatggagagaggcaccgtgacggtggctggacaccagccacgacgggtccgggaggacgaggcacgagttctcttcctgaccgacggcacccgtcccgccgcccagatcgccaagagcctcgacatggagcccgagcggttgcgcaggatcctcgtggcccatgaacgtcgtcacaccgtgatctgggacgccaacatccctgtctcagtgcacgcgtgggacatcctgcacgaacgcattgcccagatcggagacgctgggctgcgagatgaggccactgctgttctcacgaggttcgacgagcttctggaggtcatccgcaacattcccgacgcccggtccctgacggaggcgacggaatccctgtcccgtcttttcgaaaccgtgacaggaacctcttcgaacagacgtgcgggccaggcatatgcagcccgcagcctgtgctacctggactgcacccgcgccggaaccgccaaggttgggacccggcttctcgaagccctcgacgcccccctcaacctcgtcctacaatccgctgactggttcgcggcgaccttggcaaaggaatacaccaccgaaatcacggacctcgcaaatcgaaagcagcgggcctcccaccagccactgaccatggctgatgtctggccgtccacgatgtcgctgttctggggggactcaccgtccccactgcagcgagccgtgaccgaactgtcacggcggtggagcagagtcctcgaggggctgcagccagtcgacggtcgcatcgacacgacatcgtccgctctctcgggcgccgtggacgagcagttccccgtgtgcaccccgattccagaactgtcagtgcacagcccggacctccaggtcatcacctcgagcactagcaacatcgcctccggacgaatcactgcagtcatgggtgagctacatgcctgtctgagcagtctcgacatgccgttgctcgagtggtcgctgccccatggttccattcgcgatcgcatcaacaccgcgctcaacctgcgacgtctggttcccttgttccccgagacatggaggcgcaacaccggccgcatggttccagcgacggtcggagtgggggatcgcgcaatcgggttcactcggacggccgatcaagaccgtgcgaacacatggtcgatgtcggcactgctgttcgagcagaccgaggacggactcatgatccgtgatcccgatggcaggctctggaccatcgcacaagcgtggagcgtgcccatctccatggtcgccgccgatgcgttcaagatcgggctgcccggctcaccagcccctcggctcaccattgacaatctcgtcgtgttccgtcgtacctggaggtttcccgctggctccatcgacatcatgcacggttcagccgccgagaaacacgctcggctgagggagtggcaggtcacgaatcaccttcctgaccacctcttcgtcaagttcccctccgaacccaagccgatctacttctccttcgagtcccccgccatggccacggtcttcacgcgatcactgcagcgcgacgcccgagagaatccagacagtctcgtgacgatgtccgaagcactgcccgagcctcaatcctcatggctgcacgacacccggagccaccactacgtccacgaattccggctgcaactgaccaaggagcgacatgacgaccacagttgagacacatcccgaaacacgtggcacaaccgcgacatccatctccaatctgatcggtcacacccctctcgtaagaatggaccatctgttcgacggcctccccttcgaggtgtacggcaagctcgagaagctcaatcctggcggaagcatcaaggatcgagcagcacaatccatgatcgaacgggcaattcgacggggtgagatcgtcccgggccgtacgaccgtcatcgagtccagttcgggaaatctcggcatcgccgtggcgatgctgtgccaggagcacggcctgaatttcatctgcgtaaccgatgccaaggccacgccaacgaacattcgactcatcgaagcgttcggggccactgttgaggtgatcgaagaacctcatcccgagagtggcgaattcctccccatgaggctcaagagggtaagagaactgctgtcagagattccagatgcatggtggccgaatcagtacgggaaccccgacaatccggcggctcacgagcggactgtccgcgagatcatcgaggcaatcccgcgggttgacacgattgtctgcgcgaccggctcgtgcggaacccttcgcggctgccacgaagcattgcgaaagctgtccccacgcacccgactcgtcgccgtggacgccaagggcagcgccatcttcgacgaggcaggagcaccccatccccgctgtgtcccgggacacggtgcgtcagtgcgaccgccgctgtggcgcgcggggctcgccgaccaactggttctggtctccgacgcggactgcgtcgtgggatgccaggaggccctgcgcaccgaggctcttctcctcggcggatcctcgggagcaattctgacggccattcaccgagtgtctcccacgattcccgctggttccaccgtggtgacgatcctccccgacggcggcgagcgctacatcgacaccatctacagccgctcgtgggtcgactcacacatccccgggctgccctctctcgccgactggggggctcccaaccccgccaattcgtatgacctgaacagaagtgcctcatgaagctctacaccagagagaccgtcgaaactgcgcttgtcgggcgtcatggccaggttctcagtgccgtacagagtgcatacatgctgcattcgacgggagagacatcgctgccattctcaaccttcctccgcccggccgggtatccgaacgatcggatcatcgcacttcccgcccacatcggaggcgacttcgacatagccggtatcaagtggatctcatccttcccggaaaacctcgaccggggccagcaacgagcttcctccgtactcatcctcaatagtctggagacgggatacccgaccgccctgctggagtccagtcagatttcagcaacgcgaacggcagcatcagccgccctggccagcgccaccctccatggctccgaagaccatgtcagcacgattggcatcatcggctgcggaacaatcaatcttgcaacgatcgactacctcttccacgtgcacccccagatcaacgaggtcctctccttcgatctgaggcgggagcgggcccatgagttctcgcacctcgtcaaggcttcgcacccagaggcccgggtccgtgtcgccaaggagcccgacgagattctggccgcaagcaacaccatcgcgatcgccacgaccgactcgagtcattggttggaccttccgccgtggcacgggccggggcaccaagtcgtcctgcacacgtcgctgcgagacctgtcagtgccctcgatcctggcagcggccaacgtcgttgacgatcctgatcacgtctgccgtgaagcgacgtccttggatctggcaactcagcagaccggcaaccgggacttcatcacggggagaatcggagacctccttcttggcgcgccgctgtcctcaagtcctgactcccgtgtcattttctcacccttcgggctcggcatcctcgacctcgcagtcgcctccgtcgtcattgctgccgcctcctcttcagcagtcgagatcaatgggttcgaccccgggaaacacgccacaagcatgattgaggtgaatcgatgaccaccacacagatcaacgacaacacggccgttctgcgcgacgtattccccgccggctccgtcgcattcgtgagcggtgcctcacgcggaattggcgctgcctgcgcgacagcccttgcggccgcgggatgcaacctcgccatcacttatcgaaggaaggagaacgaggcggcacaaatcgccgaatccattgaagccatcgggcgccagtgcatcacaatgcagatggacgtaaccgatgagaaccaagtgaccagagccttccgcatcattcgccagcattacggacgcctggacgccgcggtcttgaactcgggaatcaccagtgacgggcatcttgcaacaatgagccgctccaagtggagctcggtgatcgacacgaatctgaccggaaccttcctctgcacgcgcgaggcgaccaaggccatgtactcgtccggtggctcgatcgtcatggtcgcgtccaccagtggagttgcagggcgaccgggccaggccaactacgcagccagcaagggcggaatcgttgccatgatgaagacgctggccccggaggttgcggcaaagaacgtccgggtgaatgcggtggcacccggcttcattcagaccgacatggtggcggccgttccaaaagcggcactcgcccaggcaatccaacacatccccatgggccgtcttggcctggcacaggaggttgcgtcagccgttaccttcctggcctccccgctcgccgcctacatcacagggaagaccctcactatcgatggcggaatgatcaacggctgaccccaggacccgcacacccccagtaccgagaaaggaacaacaatgaccgagatcacccacactgccaacagcatccgaacccgcgccgaggaacgttccaacaaagcttggcgcctgaaggaggagatcatctccaagctcggtctcgagaccaagccagaatatgtctcggacaaccaaccgctcttcggacgtggccttgagatggattcccttgacactctcgaagtcgtcgtcgccgtcaacaatgagttcggagtctcggtcaacgacgacgacgtacaggcgttcggctcgatcaatgccatggtcgatttcatcgaggtgaactagaagtgagttctcttgcgctcgaggcgccacccaaggacgcccgtaagaaattcgcctacgacagcgatgccatcaagacgatgctcccacatcgttggccgatgctcatgattgatcgcgcctacgacgtcgtcccagggaaatcgggcaaaggcatcaagtcggtcagcgtcaatgagccgttcttcgccggtcactaccctgaccattccatcatgcccggcgtcatgatcgtcgagtcgatggctcaactcgtggccgtcatctacgtagccgaggccattcagaacaatcccggcatgacgtcgcacgacgcacgttcaagcgttggttatctcggcgcgatccgtcagatgaagttccgacgcctcgtcactccgggcgaccaactcaccctccacgcccagctcggcgagaaagtgggggctctgcgcgaggtttccgtgagagcactcaatggccgggatgtcgtcgcccagggggaactcgtcgtcaccgagcggtgacacccagccacacacgagaaggaagtcccatgatcgttcgcccctacaggccacgtgatgcggaagcgatcgtacatctctacaacagccattccgactcccccaatccagtgtcgggagggattgttgaggaggagttccagagggagctcgaagaacgtggttcgacagtgttcctagtggccgaggaggccggatccattgtcggcacattcgggatgttccgcacgaatggccgacacaccatggccgatgatgaagtcttcgccgacatgttctatgtcaccccgtcacatcgactctcgacagttccgggacagctaatcactgaagccatcagcgagtgcttcatccagggcatcaacgtgatccgcctcaccgtgaaccccgcgaacatctccgcgctcaaggtttacagaaaagtcggttgtgcctgtctcggggccaccgatgcaggcgaggacgggaacattgagctgtacaacttcatccctctggttcttagggcaaccatcaccaaactcgaccacgattgtattcgagccctggcggacatgacttcgttcgcctgcatcaccgagggacgtccacttgatctgtcccacgacttcatcgtggacgctggacggaagatcgtctcccacagcatccagatcgggcgttcaaccatccacgccatggtcgacacgggctcgaggaccattgtggaggccaccctcgacaaccgcgactgggatgctcctcgccagatcgtcgcccccaccccctgtcagaaccggcccgaggaacagcgaggcaaccctgtccggctggtgcacaagaagcttgaggtcaccttcaacgaaggagtcattgagatcagtacgactggccactggggcccggtcctcgcaatgtcctggccctcctccgtctcgcaccgcgctcacgggtggcgacagggccccgccaagtcgtatcgatgcgagcttctcgagaattgcctcgtcctggatgacgaaggaggagtgaaatgcaccatcagcctcaatgattgccaagtcgcgatccggatggatggtgccccaaaaacggaattgagaatgtaccagtggtgcagcctgcgccagggctatctgacggctgacaccggcatcacgagcttcaaccgggcatccagtgggctcggagtcgccgtccgggactcgtccgagattgtcgccgcgggccttcccgtcatccctgacacaccgatcacatggagtgagggtgacatcacggttcagctcgatccctgcggccgcgcctccctgatccactcgaccctggtggaccgaagaatccacttggacgagtctggctcggcaagtctcaccatgaccgtgtttggtgattcccagccccatcgtgccgacaccgtcgagctgcctcccctcgcggcaggcaccgacaggatcgtcctcaagccggctgccggaggcgtgaccacatggcgcttgggcgccaccaaggtgctcaagtcaccgtggccacacgcccgcgcgctcgggcccaatccgatctggcgagccggcctgtgggtcagtcacgagccggatcgccacgaccgtcgccaaggaatggggtggggtcccgatcatcgcagttggaccctgtcggaagacaccatgaccagtactgacgggacactctcctggcgcttcagcggctcccccgacaccggctggacggtcgacgtcacgacgagcaacacgcacggggagaccgtcgtctggctcaccccggactgcccggcgggcgagaggatccgcacgtctgatcatgccgtgacgaccatgcttgacatctcgaagccatggcagcgctggaccacccgatgcgcaattcctctcagacacgggaagtggttcctcatcgagcctgatcatgacctcactgattcccccgaaatcctcatgcgctctgttcacggggtcctgctcgtcggctgtgtcggacgagcccactccggatccgcttcctggcgctttgccatcacgtcagaactccccacctccaacccaagaagaaacgactacacctcagccgcctgaacccaaccagttggaacacccactacagaagaaatggagcaccaccatgtccatcactgagcagtacaagacccttcgcacctcggtcggcctccacacgcctaccggtcccctggtccgtatcaccggtgatgatcgtctcgagtttctcgacaccttcctgtcccgcgcctcggacttcgtggaccccgacaccactcgggagtgcctcgctctcaccgaggacggccttccgctgacgatcttcctccacatcgagcgcgaggaggagtcatggctccttccccgcaccgccatcgatgcggcgaccctcgccacgtacctcggcaacctcgagaccgatggtgacctgtcaatcgagattgctccagagggttggggagctgtcgctgtcgaggggccgctgtcgtggcagatcgccgaaaaccttctcgacttcgacgtggctggcctcgttcttcacgccgtcacggacgtcgtcgttcccggggcccccgagggatcgaaggcatggctcgcccgggtcggaaccactggagagtacggctacctgctcgtctccaacgttcccgacctcgcccgcacttatctcctcagccgcgccacggagctgggcggtcaggcagtcgacgccgatgctctcgcacgagtccaggccgaggccgggatgccctattacgcgatgggcgtgtgccacctcgatgtcgccgggggtgacctcgcctggctcgtggactggcagcgcatcggcgagttccaaggatccgagaatctgcccacacccgtccgagaccagcgccgactggccgccatcgccctgcccaccggcaaccgcccggaagctggtcagaccgtcgctgccggggatgaggagattggagtggtggtgtacgtcaccccgtccgccaatcccgatgaggaactcgcgttcgcacttctggatgctcctttctggactcccacccttccgttgaccgtcggtgcccacgacgggaccacggtcaccctgccccgcgtcgtggcagcctccagcctcaacaagctggggtgacagcgatgacgatcactgctgagaacgccaccacccgcagcgacattgcccggagcattgcggtgaccggcgtgggactggtcacggcacagggtgaccataccgacgagtgctggaccgaacttgtcgatggggtttgcggaatcaccatgaacgtcacgttcgatgactctggcaccacgattccgtgtgctggcgtggctcccattccgaactctgattcgatcgaccgctgttacctgctcggcgtccatgccatgcgtgaagctctcgagatgagtggcatcgacctggactccgtgggtcgtgatcgcatcggactcgtggtgggctcaagcctcggcgcgatgcccaccttggaggcggctcatcgccgggccattgagaccggcgtgctcgatgccggattggcggcagactcccagctccactgcgtcgccgaccacctcgccgctgagttcgacatccgtggaccccgcgtcgtgacatcgaatgcgtgtgccgctggtgccgtggcgatcggctacgccgcagaactcctctggtccgacgatgtggacctggtcgtctgtggcggtgtcgatccactggcccagatctctgccaatgggttcacgtgcctgggagctctcgacaatctcccatgcagcccgatggccggttcctccggtctgactctgggcgagggagccgggttcatggtcctcgagagaacagatgcggcggctgccagaggccaggaggtgatggccgaaatcgccggctacggcacaagttgtgatggttaccaccagactgccccggacccgggtggcaatggcgcccgcagctcaatggaggccgccctgcgctcagctcatctcaagccgtccgacgtcagctacgtcaatctccacggcaccggtactccgaccaacgacgccgtcgagccgaaggcactccggtcattgttcaagtccgatgaccttccccctgtcagttcggtgaagggcgccatcggtcacactctcggcgctgctggcgccatcgaggccgtgtgctcgatcaaggccatccacgagggggtcctgccgccaaccgtcaacaaccgcgggcaggcttcccgaactggtctcgacatcgtgccggagtgcgcacgcaaggccgctcccgacgtggtcatctccaactccttcgccttcgggggcaacaacgcatcagtggtcatcaccgcacctcgaggaggcgttcactgtaccgccccggcgcagcttcgcgaggtcggaatctcaggaatggcagctctggcgggaaaggccgccaactcggaggagcttctttcggccctgtcagaagattgtccaatctggatggccgatgagaagacctgggaaggggatgctgtccaaaccggccatgtggacatcaagcgcctgtcccgcacaatcaacccgtccaaggttcgtcggatggaccccttgggaatcatctccagcgcggtggtgactgatctgtatgcccgacacgggaagctgagccgcaaggatgccgaaagcacgggaatcatcttcgcaaccggctacggtcctgtgacggcggtgacgcagttcaatgacgggatcatccgccacggttccgagggtgccaacgccctggtgttcccgaacaccgtggtcaacgcagccgcaggccacctcgcgatgctgaatcgctaccgtggttacacggccaccttggcatgcggtggaaccagttcactcatggcgctgcttctcgctgctcgcgtcgttggccgcggcgctgcggatcgcatcatggtcgttatcgctgacgagtttcccagcattgccgtccaggccgtcgcgaagcttcctggctaccgacacagggttgatggttccggagccgtgctctcggaaggcgcggtatgcgtcctggtggaggccgtcgaagtcgccgaagcacgcggtaccgcccccatggcgctgctacgcggcttcggatcccgtggagagtccgtgggagtcggtcacaccgcatccgatggacgggcttgggccaaggccatggccgctgcactgggcccggccggcctgactgcctccgacgtgtcgaccgtcgtggcggcatcaagcggacatcctcgcgtcgaccgagccgagcaggcggccaggcggatcgtcggactgtccgcaaccgctacgaccttcccaaaggcgattgtcggagaaacacacggatcggctgccgggatcgggctgttcggtgccctgtgcggttcgaggtcagccgcgcaccagaacatccttgtcaacgccttttcccacggcggtggttatgcctcgatggtggtggagtcactgtgaccacgacgcttctgccacgggttgcccagccgggaccgggcgtcagccatgtcgacaccgaccgtcccatcgagtgcatcatcacccaccacccccacatgccgcgtgatcgcggaggccacgccacctccgtgtcaggcaggtacttgctgcgccaagccgcagaactcatgctcggcacggatcctgcgcattgccccgtcgtcgacccttcgcggcgctggtactggcccggaatcaatcttcacggttctgtctcccatgtcccgggctggagcctgacgacgctgagcaccggcggccacatcggggcagacatccaggacttccgggagcgtcccggcgcaatggcattcatcggtgacctggtcaagctgtcgcgatcggcgtcactccgagaattcgcggagtgcgaggccgtcgtcaaggtgtccgaattgactaaggagacgttcgggcacgtgcgactgcccgaatggacacccggatggcgccacgttttcgaggactactgggtctggagtctcgagatgcacgggatgggagtcatcgcactcgcatccgatctcccccgagccattcgctggtggcggtgcgacgccgatgcccgtggccgtctccaggctctccgacccataagcagtcttggaccaggaaggccgtcatgagccggtactcacgtcgaatctcaggcatcgaacgcggctatctcaacgccgcaacccggggcccgcaccccaccatccacacgatgatcgacttcgagggccgcgtccccgccgactgttggcggcacgcatccacgattgcgtcggccgccaaccctggcatgacggtggtccggaggtcgggccgatggacatccgatccagcgggctgtccggttgtgttccacgactggaccgcggaccccaacgacgttgccgacttccacgctgacatggatctcgtgacgggaccatcgtccacgctccacgttttcgagggggcggaacgcacccgaatcaccttggcagcaagccatgccgtgaccgatgggcggggcatcgaacgatttctcgtcgacctgcttgcagcgttggacgagcgtgaacccattggaagccccgacaccctgaccgatgtcgatatcaaacgatccttggagaacagcatcaagccccgacgccacctggccgctgtgcccgccgatgtcctttctccactgggggggaggaagaaccaacgtatatgggcctccaggacgtggcacagtgccccgggagccatgagcggaagaatcgctgccgctgtggccgagatgatcgaccacgccgcaatgatcatcatcccggttgacatccggcggcacgtcccagaggtccgatccacagcaaacctaagtgcccaactgccagtgatcatcaccccgaaccagcgctggcaaagcatccatgggcatctgctcacggaccttgctcgccatcgagaccttgcgatcatcagtgaggatttccgccacaacaatccgttcgcatcgaccttggaggaaagccaggccatcggcctcgatggtgtctatccctgtgccgcaatcatctccgaccacgggaagctcgacctttcaaggttccagaccttggaactcaccccggtctcgatgcgaagcctcccgatgctcgttccctactccgcaatgttcatcagcagttgcaccgtcggcgagaccaccactgtcaccatcgctcatcgcgctgatgacgatcccgattccataaacaccttcttccaccacatcgaatcccagatgtccatctgagccacgtcgtccctggagagcaaacatgaccacccaagatgtcatcaccccgccgcgccccgtcacctcccatgccacggcgaccaggtccgaggctccaccgcgaagcgtcatcagagccatggccatctcgatggtcgcgaccctcatggtcatgctcgacacgaccgtcgtgaacgtgtccttgagcgcgaccaccgcccgcttcgggagcatgggcagcgtgcagtgggtcctcacaagttacctacttgcactgtgcgcgacgatgacggcctccgcctgggtcatcgaccgccttggtccacggctcaccttcatcgcctcaatgaccatgttcctcatcggctcggtgatgtgtgcactgagcgattcagtgtggcaactcgtcactggcaggaccatctccggtgccggagctgggatccttgttccgacagcatccgtcctgcttatccgtggcatcccacgcgaacaacttggcagggtgcaggcactgaatgggagtgtccagttgatcgctcccctgatcggcccgactgtgggcggtctcctcgttgacaggtgcgggggctggccggccatctactgggcgaacgtccccgtagctcttgttcttctgattgaggccgtccgcgtcgatccggacgaaccacacaccgctaagcgccgcctcgatgctctcggcctggtctgtggcagcaccgcgatcgtgctgacagtgcttggtgtctcactcttcggcaggacgtcgcgaaacaccaccttcctgcttacgatcggcgcgcttgcagtcctcgcatgggcgttcttcatcacccacatccgaagggctaccaaccctctgcttgacgtttccctgtatcagaaccctgtctattcatggtccagcttcaacgtagcggtgcttggtttcggtctctacgcccccatggtcgtcatgcccctctatctcgaggcgacgcgccacctcactgccgtccacactggtctggtgatgtcagtggccggcgtcggcgtcattatggccggaatcctgtgcacgaagatcatgggccggatcggtggaggcctcacgatgacagttggcataactctgagcatcatcgccactctgcccctggtccggctgacgaaccacacctcctacatactcctggcagtctgcttggccttgcgtggagcaggaatcagcctgacaatcgtcccagccatgacacgggccttcgagtccatcaagaggacggccatggcggacgcctctgcacagctcaacctgttgcagcgaatcggcgggacaattgcgacagcagtcatcatcgcagttatccaccacgaggccatgctcacccgcggactctcccccacagtgttctcgcacgccaacgtgtggatcctcaccgcgaccgccgtcacccttctgccggccttcgcgcttgcgaaggccgaaagacaacagcaggatctctgagcaccgaggagtactccctcgtagaccctcctctgatctaattgggttcgttccaagtgtgtatctcactccggggagccccgattgctgaaccacatcccgttcaccctggcgagtccctcgtggtacgacgtcccctgggcgcccggatctccgtatctcacaggagatatctcggtcctgccagcggactcgccaaggtggacgacgaccatccggggtccttggcaaatccacatgccacctcgtccgacccttccagaggtggggtggaaagtgcatgtgtctgccaagccatcggaattggaatcggttgcctcagtcgtagcactgtggtgcgtacgccacagcgtccccttcaaagtacttcgcacccgaggtctcgttcacgcgagtcaagtcaagtatgcggaccgaagtcagagcggcaaggtctgcacctgctaccccgacggcgagagccttgagcacttctgctccggtcttgccgagctgcttcagaacgtcgattcacctccggtgtccggcgagctgcgagtcggatcctcccctctgtggttgcgtcacgggagtttccgagaggcatgggcggtgtcatccacaggagtaccgttcccggtctacccgggaacaacacatcctgatcgtcgaggccccgcgcccgcagaatccgatcacgacacgccgtggatccggaggctccgtcggacgaatcgccccagcacggttcttcccatcgacgatgtcagactcctccaccgatcaaatgctggcggcgtgtatcaggcaacatggagagacggcacatcggtagtcgtcaaggaggcccggcacctgtccggacttgatgcggcgggtgtcgacgcccgagtgcggctgcgtcacgagtacgaggccctgagaagactggacccctatcgggccgctccccatcccattgatctcattgagaccgaggacggctcgttcctgatcatggaattccttgacggaatgacagtccaccaggagatgtcgaggttccatcctctgattggtaggcgacctcatcggctatcgatgaccgatttttcacgctggtgccgataggtcgaagatcgcttgaggaatgtcacgagggtcatggccgggtgcggaatcgttcacggggatcttcatcccgcgaatctgatacatgtcggccatgaggttttggttactgactttgaatcctgctcaatcgacggggtcgccgtctcgtcagggatcgccgctccctggttccagtcggacgacacgattcccgatccggcgacgactgacgatctccacactcttctcgtggatccgacttgcggccccgcgcttgtcctccatccaaatcttcgcgcgctcatcagccaggccgcagtcgaggacatgatgggaaatccgactggtttaccacatgcctggaacctcgaggacatgacaagcgaactcgccaaggggatccgggcatcagccactcccgcacgagccgaccgcctctttccctcagacccctacctgttcgggcatccaggttcagaattcggcctgatgcatggcgccgccggaatcatggctgctcttgccgtgactgggtacggtgttgacgcgaatcacgtgacctggatgaaggaccgcttggccacccgcccgaccctgctgccggggttggccaacggaatcgagggaattgccctgggtctctccctgtgcggtcagaacgacatggctgcatccctgctccaccagtccggaattctcacgatcacaacgaacggatcgactgacctcaccctcggtactggtatggcgggccgagcgtgcgcgctgcagtccctctcacaacgactgtcatcgaaatctctcgcccacgctgcatataccctctgggaacaactcgccgtggctgtgcggaacactgatgtggccttgccgaacggcctgttctccggttgggagggaatcgggctctccctgcttgcctctcccctgccggatcgtcatgatctcgcccgccactcactccgactggccctggccacgacaacgattgttgacggtgcgctcttctcaggcgagggacagatccgatggccatatctggggcgtggtcccgcggcatgtggcccgctcgccgccaggcttgatgatgaccagacggccaaggccgtggcacagacctgtcgttgtcccctgactgagtcatccggtctccacaatggccgcgcaggtctcctactcgtcctccgccagctcgtgggagaccaagacgacgccgttcgccgccacctcatgagactgtcgtggtcgatggaccgtcgcgaggaaggcacattgctgctgggtgatcatggcctgcgtttctcatccgatctcgcgacgggatcagccggcgccctcctcgccctgagcagggacccatggcggaacatgacacgaatgctcggaatatgcgatgacacctgtcatggcccactagtgacagtttgatctagcgccgatagttcacaactgaaagactccaaacatcgaggaaaacatgctgagccaaaacgccttggcaggcgtggctcgtttcaccacgatgaacaccaggagacagaatgtccgttgaggccatgcaatccatcgagatggacgaggaaaacagcgccagccagacagtttgcgcttgttacagcttcttctcgtggtcaggatgctgcgtagtctcccaagcggtggaagcatcttgatcgtgtgagacgccgtcgactaccctgtcccccgtggtacgcacacgccccgtcctggacagtcccggaagaccgctcatcgcctccggagtcgtcctggcggtcctgctcatcatcgcggtgatgacgatggtgcttcagcgcgaccccactctcacccccggacgccgcattctcggtatcgtcctgtccacggtccaggccgtcggattcatgtggctgcagacccgcatggttcgtcacggcaagggttcgcgcaacatgcgtgcgacccttggaagggtcggtttctgggccacgtggggactcgtcgcagtgggagtcgtcaatctgtggctgaccaactcgtggaccctcttcggggcctccgtcgccacgcccctccttctcctgccaggggtgtggagtgtggtggccaccctcgtgaccctgatcgtcggtttctccgacctcgtggtcacccacacctcgccactgacctcagccacggtcgtgctggtgaccatcgcggtgtcggtgaacctctacgcattcacgaagctgtcgacggcactcgttgaactccgctcctcccaggaggagatcgcccggctgcgcgtggacgccgagcgtcaccggatatcgcgggacctccacgacatcatcggtcgcaccctggtcgccacgtcgatgcgccagcaggcggccctccacctcgtcgaccgcgacccgcaacgggccaaggaacagctcgacgccgcccatgacgcaatcaccgaggggcagcaccagttgcgttccatcatccaggccgagatgagcaccagcctccccgacgagatcagcgacgccacattcctgtgcgaccgactccacatcgacttccgcatggatgaccgcggcagaccgcacaaacccttcgactcggcggcggcggcggccctgcgcgagggaatcacgaacatgctcaagcacagcgcggcgggctactgccacgtcgccatctccccggacctcctgaccgtcaccaacgacggttgtccgcaatcacctcgcccctccaccacaccgggcaccggaatcgaccatctccggtcccagatcgaggcgctcggtgggtcggtgacgacgtcgcggccctcgcggggcaccttccggctccgctgctccttcccgacccggggggcgtccacgaccacacccgcgaccgaaggaggacgatgacgacgagaatcctcctcgccgaggacatcaaactggtggcagaggccttcgaggcactgctctcggtggaaccggagttcgaggtcgtcgcacgggtggcacgcggcgacgacctggtcacatccgccacccgcctgttccccgacgtgatcctggccgacatcgacatgcccgggatgaccggcatcgaggccacccgaatgcttcgcgacaagggataccgcggcagaatcatcctgctcaccgccctgccgggaagcgggcacctgcacgccgcgatggctgccggagccgacgggtacctgctcaagtcgatcaccgcgccctccctcatcaacgccatccgggcggtgtgcaacggccagtcggccatcgacccgaacgtcgccgcggtcgccatgcgcaagggaccctcgcccctcaacgaccgggaaaccgagattctgcgcctagtcgccgacggttcctccaccgcgcagatcgcctcgcggctgtacctcagcaagggcaccgtcaggaactacctgtcgacggcgatgtcgaagctcgacgccgactcacgcacagcggcggtcacgcgggcacgcgaggagggctggctgtagcaggcgacccgctcagcccaccgcccctcagcccgccgactcctgacgcacggcctcctcgaccgcccggctgagcagggacccggccctgaccatcgacgtctccgggtccggctcgaggtcggacaacgcgatgatccggtcgaacgcggaccgtttctcctcgggcaggtcacagcgtccgcacaccgcccagacgggcaccccggcgtcccgggcgatcttgcggatggtgtcgggaagcttgccgagcagggtctgctggtccagccgcccctcccccgtgacgacgagactggaggcggagatccgcgacaccgcgcgggaccatcccaggacgaccgccgcgcccgggcggtacctggtccccaggcacatcagcgcccagccgacccggctgggcggctgcgaaccccctggccaccgcccggcaggcctttcccgaactcagcgaccccttgaaggagtcgacggcaacgatgaccggcgcattcggatcaggacgcatgggatcagcatgtcacgtcgatacggagcagtcgcgccgcctacccctagactcgggggcatggtcaaccgagtctacctgtccctgagcgttctcgccctcgtgctgtgggtggtcgcctaccgtcacatgccgggctgggccgcgggcatcaccctggtgggcatcgtcgtgctgtcgctgtggtgcgagtggtcgcgggtgcgcaccctggccaggatcggcaagtcccgccagcagggcccccgctcctcccgaggacgcaacctgtcgtgagcaatacgattcccgcagccctccaccccggccctgacgaggcc

SEQ ID NO: 431 - DNA, 26620 bp, Propionibacterium acnes; identical to SEQ ID NO: 430
  source 1..26620: mol_type = genomic DNA

SEQ ID NO: 432 - DNA, 26636 bp, Propionibacterium acnes
  source 1..26636: mol_type = genomic DNA
ccttgtggacaccacgtcatccacatgacttgtgtcacatgattcccggaccatcatcaagcagatgctcacccaactgtaatgatttctgttctgaatctggacatgctctgacctgcattcaatgatcaattccgtgcgatattccacaacgcacggagaggtcgcagacaatgacaacagaaagcatccccacgcggctgctcgtgtggcacgagcagaccgatccgaccaagctcctcaggatcaccgacgcgatcaggaggggggatccccttccccccatcgaggccatggcgatcggccacaaattcctcgtcctcgacggtgcgcaccgggcccaagcccaccagtactgccatcgatctgagatccgagcccgcctccacaacctccccctcagcgcggaagtaccaggctggagccactccataccccgcgatgcagcagcgaaactggctcacctactcctccccgtggacgctctcggtcaggcggaacatcgtcctgcacggggtgcgccgtcaggtggggaccgcttcacaacgaccgcgcgacatctttctcgcctgccaccggatcgcgcgagttgcctacgcgcatggaatcagacctctcggcccggagttctccaacgctccgacgatcgacgccgccaccatgacctggcccccgccgaacgtgggcacgttgtgggccatcgccagcagtctcggacccctgcccgcaactgtgacccggttcgccccgatcctccggcacgacgccatcggggattccgcgatgacacccgtcacctccgccgcgtgacgacccgcgccaattccgccccaccactggatgaggggcagccgcgtggacgatgctcctgttcaggcagggactccatacgagaccaataggaaaatcatgatcaaaaacacaagccctctgaccgtgaaaaatgtctcgaaaacattccgtggctccagcggagaagccatcaaggccgtgcaagacgtgtcattcaccgttgagcgtggtgaggttgtggcattcctcggcccgaacggcgccgggaagtccaccaccatcgacatggctctcggcctcacccgccccgacagcggccagatcgaggtcttcggtactgacccgctcagcgcggcccggtcgggacgctgcaccgcgatgacacagaccggcgggttgctgcccgacctcacgattgggcagaccatggagatcatctcctcgctctatcgtggctcccacatgaatgcctgcatggagcgagcaaggatcacgcatctggccgatcggcaggtgtcgatgtgctcgggaggcgagcgccaacgacttcgcttcgcactggctctgctgcccgatcctgacttcctcatcctcgacgagcccactgcggggatggatgtggaggcgcgccgggacttctgggcagagatccacgaggacacgcgtcgtggtcggacaattctgttcgcaacgcactacctcgacgaggtggacgagttcgccgatcgggtcatcctcatcaaggagggccgcgtcatcgccgacgacacctccgacgcgatccgcaccatgtcggggggttgcaccgttacggcgaccattcccgacttctccctggcacgactgaatctgccgggcacccaactcatcaagcagggcggcgcacgcgttgatctgcaccatcccgattccgatgccctcgcagcgcgagtcatccagctcggcggcaccgacctgcgcgtggtcccccgcagcctcgacgacgccttcctcgctctcacctcaaccaccaaggagtcctgacatgaccgcccaagcgcttcccgcagtcgccactcccaaggcccgccaccgatccgccatctcgctgaagtacttgtggtgcgagatgcgtcgccccttccggcgttcgacgatgctgttcaacctcgccctccccgcagttctgtacctggccctgttccgcaccgtccacaccgccgagctgccggacgggaacttcgcgatgtggatgatgatcggcatcgctgtctacggagcggccactgcgagcaccagctacgcagcctccatctccgtcgacgaggccaacgggtggacccgcaccatccgcctgacgccgttgtcgtcggtcgggtacgtgctggtgaaggtcctctgcgccatggccatcgccctggccccgaccctgctcatcggtctcatcgggctgttgaccggagctcacggcacgctgcgggtctgggtaatcggactgggggcggcttggctcagctcagcaatcttctccgccttcggcctggctctcggactgtccctgcgtcccgaggtcgtcatgcacgtccccggcctggtcatcaccggtctggcgttcctgggcaacgtcttcgtccccctcagcgggacgatgctcaccattggccgctggagccccgcctacggcatcaccgcgctggctcgttacccgctcaccaacggcatcgacatcgggggcggccacgactccctgacggctgccctcatcggcaccttctgctggttcgccggattcgtgttctgggcctcccgtcgatttaccaagagcacgggtcgtcagtgacagattcggccgatctccggaaggagcagtgttatgaccaagcccctcattgcagtggtcaccgcgggccaaggagcgcagaagcctcgcctgctcacgccatggctcaaggtccccggcgtcacggagaagcttgctgcatggtccgctcaggccgatgtggacctcgtcgagctcggtaccagggcgaatgcagaaaccttggcagcgaccgagaatgcgcagccactactggtctgtctcggagtcctcgtctcggatctcctgaccgaccagaacattgtgctcgcaggacactccgtgggcgagctgacagcagcgtgtctcgccggggtagttgatcccgggacggccgtcactcttgcacgacggcgtggactggccatggcgcgggcctgcgctctccacccgaccaccatggcggccatcattggtgacaatccggatgacgtcctccggcggctctcggaactgggactcacggctgccaacatcaacggaggcggacagattgttgcggccggctccaccgacgcgatcgcggaactggtggcgacccctcccaacgggaccgcagtcaagccgttgcgagttgctggcgcctttcacaccaagtacatgacacctgcgcaggacgctttcgcccaagctgctcaggacgtcaccttctccgacccgcagcacccgatcatctccaacctcgacgggcaggagatccggtccggcaatgacctgcgtgaacggctgattgcccaggtgaccgcgccagttcgatgggatctctgcatccagcagatcgcggatcgtcagccggaactcgccctatcggcccctccggggaaggtgcaggcgtcgctcttgtctcggcagatcccggacctcgcgacggtctgcatcaccacaccacgggaggcagcccaggctgcacagcggatcgaccagtccgtatccgtccttcagggggcatgatgctcatccccgagtacttcctcacagcctgttcggaccatgctgagcgcctggcgatcatcacccacaatgacgttgtgacgtgggccgaactggcgactcgcgtcgacggttttcggcgctggctgcgggaccatggcgtgcaccgccaggacagggtcgttctccagacgccaagcaccgtaggcacggtagccctcatgtgggcctgcctgctcgacggcgtgacgatggtcccggtgcaccaggacctcactgcctcccaggtgcagcaagtcatcgacgactgccgtccagctctggtgtgtggcagcccggacctcgtccaactcctcaactcccccggaatgaagacaagcacacctccaacgcggccggagtcaacgagtattctgccgtccttgtcccgggtcagccccgatgaccttgcgatgctcatctatacgtccggcacgacgggtctcccgaaggggatcatgtgtccccaccggcaggtcgccaccgccgcacggatcgtccatgactgtctcgggtaccgcacggacgacgtcattctctgtcgcctgccgttgtccttcgactacgggctctatcagattctgatgtctgccatctccggtagcgcggttgtcctgcgggacggaggcgcgcaggaccgcaacctggtgcgcgacatcgcccgtcacggcgtcactgtcgttccagtcgtgccgtccatggcgtcaatgctcatcaccctgcagcgtcgtgatcagttgccgaccatcgtcagactgttcacgaataccggggcgcgtctggcacccgagaccgcgaaccagttgctcgcaagcttccccggctcccgctatgcgtcgatgtatggcatgacggagtgcaagcgcatctccatccttccggtggaggagtacgagacgcatccggacagcgtgggaagagctctgcccagcactcacgtcgagatcgttgacgctcagggagttccggttccggcgggcgagcacggggagatcacggtgtccggcccgaccgtgatgaacggctactggcaggtgccgaacagtcccagtggacgattccgacccagcggccacggcctcactctgttcaccggtgatcgcggctggatggatgaggagggacgtctctacctcctcgggcgcgacgacgagatcgtcaagcatcacggcatccgaatcagcctgcaggagatcgagatagccgccgaagccgcgccgggcgtcgacgcagtcatcgctctcaagccggcctccgactcggcccccattgaaatcgcctactgcggcagcacgagtcccgagaacctggcccgccatctcgaaaccgtcctggaccgggcgcgacgaccccaattcatccaccaactccagcagatccccctgacccgtaacgggaaaccaaaccggtcagcagccgccgaggccatccgctcaagggcgtgacggcgaaggccaacacccacagacgaaaggaaaccaccatgacccaggccgagttcaaccagttcatcgagtccacctgctccgcgacgatcgtggatcccgaccgtcctttggtcgatcagggcatcgactccctcggaatgctcaccctcatggtcgctatcgaggacagcctcggcatcgaactggatcccgagtccctcgccgacggtaggggttccacgccctccggtcttctgtcccttgtcgagcagctgaaagcgacggtgtgacgacatgacgacgatggttccttgccgccgtgtggagatgccgcaactgttcgaccacatccccggaagcatctctctctcaggagggctgcccgatctgagcgtgctcccgagcaatcagatcgccgaactgacgtcccggatcatgcgtctcggctcaagaatcctcctgcaatactccaccccttcggtctcgtcctccttggtgccggccatcctggacctggcggaacgaacatgcatgtcaccggatccgcggaatctgatcccgaccgcgggttcccaactgggcctggccatggtgatcaatgcctttgacggcgatgagatcatctgtgactgcgccacctatcccggggcgctggccgccttcgcctctgccggcgtggaaacaacgggggtggccagtgacgaggaggggctcaacccagacgcgctcgctcacgccgtcgcagagggtcgggccaatggccgccgcatcgcagccgtctacaccacgcccaccttccagaatcccaccggctccgtacagtccgagaaccgccgtgcggccctgctcaaggtgtgtgctgacaatgacctcctcctcatcgaggacgatccgtacggcatgctgtccttcgacgggcagacgtggccagctctgaagtccatggacccacagcgcgtcatctacctgggcaccttctcgaaggtgttcgcaccgggcgtccgttccggctggatcgatccgcccgccaatcttgtcgagaaactccgcgctgtgtgcgagatcatgacactctcgccatcagccctcaaccaagcgatcatcggcgagtaccaccgtcgtcacggatgggacgaactgttggagggctatcgcgcctcctaccgcgaccgagcccgtctcctcatcggggctctcgaggctgaactggcaagaacgaattgcactggcacgtggacctggcgtgaaccacggggcggcttctacctgtggttggagaacgtcgccagcaccagcggtatcgacgttgcgcgtcgcgccgccgacaacggagtggccgtggtgcccgggaaacacttcgacgcagccggacacgattcgccgagcctgcgggtgtcgttcagcaattcacgcccggctgatctggtcgaaggagctcgtcgtctcgcccgtgcactggtgggagaggacgttcagaaatgactctcgcgacacgcaccgccaccgacaccctgcagcagaccttgccctggggcacccacgaacgtctcgtcttcgggcgggcgctcctgcgcagcaccggcttcccagccgaaggcttggccctgctcgactccgacgacatcctccccctcctcgactcctttcttgccggggacatcgacagaactcacttcgagaaggaatacaccagtcgcgaggagtccggcgcaagggcgctcatcaacgtcttgaaggacgatgcagtatcgcgcgccatcgcatggcagaaccccaccgcgtggaggtccttcgaatccctgtcgtccacgagcggaatcaatgcttcgactcggcgcaaggtacgccaactcgccctctactggcaacgttactgttccaaggctgagaccattggatacttcggcccgttcgcctgggccgaagtcgacccggaggcctctgcggtcgaattcatctcctccgaccatctgatcgaccgttcccacgtcgcaatggaggcgtgggcggtcattgagatcgggaaagccctggcatcacgggccgaccttcagtggtggatgccaccaatcctgtcccccgccgtcgacctcaacatggagagaggcaccgtgacggtggctggacaccagccacgacgggtccgggaggacgaggcacgagttctcttcctgaccgacggcacccgtcccgccgcccagatcgccaagagcctcgacatggagcccgagcggttgcgcaggatcctcgtggcccatgaacgtcgtcacaccgtgatctgggacgccaacatccctgtctcagtgcacgcgtgggacatcctgcacgaacgcattgcccagatcggagacgctgggctgcgagatgaggccactgctgttctcacgaggttcgacgagcttctggaggtcatccgcaacattcccgacgcccggtccctgacggaggcgacggaatccctgtcccgtcttttcgaaaccgtgacaggaacctcttcgaacagacgtgcgggccaggcatatgcagcccgcagcctgtgctacctggactgcacccgcgccggaaccgccaaggttgggacccggcttctcgaagccctcgacgcccccctcaacctcgtcctacaatccgctgactggttcgcggcgaccttggcaaaggaatacaccaccgaaatcacggacctcgcaaatcgaaagcagcgggcctcccaccagccactgaccatggctgatgtctggccgtccacgatgtcgctgttctggggggactcaccgtccccactgcagcgagccgtgaccgaactgtcacggcggtggagcagagtcctcgaggggctgcagccagtcgacggtcgcatcgacacgacatcgtccgctctctcgggcgccgtggacgagcagttccccgtgtgcaccccgattccagaactgtcagtgcacagcccggacctccaggtcatcacctcgagcactagcaacatcgcctccggacgagtcactgcagtcatgggtgagctacatgcctgtctgagcagtctcgacatgccgttgctcgagtggtcgctgccccatggttccattcgcgatcgcatcaacaccgcgctcaacctgcgacgtctggttcccttgttccccgagacatggaggcgcaacaccggccgcatggttccagcgacggtcggagtgggggatcgcgcaatcgggttcactcggacggccgatcaagaccgtgcgaacacatggtcgatgtcggcactgctgttcgagcagaccgaggacggactcatgatccgtgatcccgatggcaggctctggaccatcgcacaagcgtggagcgtgcccatctccatggtcgccgccgatgcgttcaagatcgggctgcccggctcaccagcccctcggctcaccattgacaatctcgtcgtgttccgtcgtacctggaggtttcccgctggctccatcgacatcatgcacggttcagccgccgagaaacacgctcggctgagggagtggcaggtcacgaatcaccttcctgaccacctcttcgtcaagttcccctccgaacccaagccgatctacttctccttcgagtcccccgccatggccacggtcttcacgcgatcactgcagcgcgacgcccgagagaatccagacagtctcgtgacgatgtccgaagcactgcccgagcctcaatcctcatggctgcacgacacccggagccaccactacgtccacgaattccggctgcaactgaccaaggagcgacatgacgaccacagttgagacacatcccgaaacacgtggcacaaccgcgacatccatctccaatctgatcggtcacacccctctcgtaagaatggaccatctgttcgacggcctccccttcgaggtgtacggcaagctcgagaagctcaatcctggcggaagcatcaaggatcgagcagcacaatccatgatcgaacgggcaattcgacggggtgagatcgtcccgggccgtacgaccgtcatcgagtccagttcgggaaatctcggcatcgccgtggcgatgctgtgccaggagcacggcctgaatttcatctgcgtaaccgatgccaaggccacgccaacgaacattcgactcatcgaagcgttcggggccactgttgaggtgatcgaagaacctcatcccgagagtggcgaattcctccccatgaggctcaagagggtaagagaactgctgtcagagattccagatgcatggtggccgaatcagtacgggaaccccgacaatccggcggctcacgagcggactgtccgcgagatcatcgaggcaatcccgcgggttgacacgattgtctgcgcgaccggctcgtgcggaacccttcgcggctgccacgaagcattgcgaaagctgtccccacgcacccgactcgtcgccgtggacgccaagggcagcgccatcttcgacgaggcaggagcaccccatccccgctgtgtcccgggacacggtgcgtcagtgcgaccgccgctgtggcgcgcggggctcgccgaccaactggttctggtctccgacgcggactgcgtcgtgggatgccaggaggccctgcgcaccgaggctcttctcctcggcggatcctcgggagcaattctgacggccattcaccgagtgtctcccacgattcccgctggttccaccgtggtgacgatcctccccgacggcggcgagcgctacatcgacaccatctacagccgctcgtgggtcgactcacacatccccgggctgccctctctcgccgactggggggctcccaaccccgccaattcgtatgacctgaacagaagtgcctcatgaagctctacaccagagagaccgtcgaaactgcgcttgtcgggcgtcatggccaggttctcagtgccgtacagagtgcatacatgctgcattcgacgggagagacatcgctgccattctcaaccttcctccgcccggccgggtatccgaacgatcggatcatcgcacttcccgcccacatcggaggcgacttcgacatagccggtatcaagtggatctcatccttcccggaaaacctcgaccggggccagcaacgagcttcctccgtactcatcctcaatagtctggagacgggatacccgaccgccctgctggagtccagtcagatttcagcaacgcgaacggcagcatcagccgccctggccagcgccaccctccatggctccgaagaccatgtcagcacgattggcatcatcggctgcgggacaatcaatcttgcaacgatcgactacctcttccacgtgcacccccagatcaacgaggtcctctccttcgatctgaggcgggagcgggcccatgagttctcgcacctcgtcaaggcttcgcacccagaggcccgggtccgtgtcgccaaggagcccgacgagattctggccgcaagcaacaccatcgcgatcgccacgaccgactcgagtcattggttggaccttccgccgtggcacgggccggggcaccaagtcgtcctgcacacgtcgctgcgagacctgtcagtgccctcgatcctggcagcggccaacgtcgttgacgatcctgatcacgtctgccgtgaagcgacgtccttggatctggcaactcagcagaccggcaaccgggacttcatcacggggagaatcggagacctccttcttggcgcgccgctgtcctcaagtcctgactcccgtgtcattttctcacccttcgggctcggcatcctcgacctcgcagtcgcctccgtcgtcattgctgccgcctcctcttcagcagtcgagatcaatgggttcgaccccgggaaacacgccacaagcatgattgaggtgaatcgatgaccaccacacagatcaacgacaacacggccgttctgcgcgacgtattccccgccggctccgtcgcattcgtgagcggtgcctcacgcggaattggcgctgcctgcgcgacagcccttgcggccgcgggatgcaacctcgccatcacttatcgaaggaaggagaacgaggcggcacaaatcgccgaatccattgaagccatcgggcgccagtgcatcacaatgcagatggacgtaaccgatgagaaccaagtgaccagagccttccgcatcattcgccagcattacggacgcctggacgccgcggtcttgaactcgggaatcaccagtgacgggcatcttgcaacaatgagccgctccaagtggagctcggtgatcgacacgaatctgaccggaaccttcctctgcacgcgcgaggcgaccaaggccatgtactcgtccggtggctcgatcgtcatggtcgcgtccaccagtggagttgcagggcgaccgggccaggccaactacgcagccagcaagggcggaatcgttgccatgatgaagacgctggccccggaggttgcggcaaagaacgtccgggtgaatgcggtggcacccggcttcattcagaccgacatggtggcggccgttccaaaagcggcactcgcccaggcaatccaacacatccccatgggccgtcttggcctggcacaggaggttgcgtcagccgttaccttcctggcctccccgctcgccgcctacatcacagggaagaccctcactatcgatggcggaatgatcaacggctgaccccaggacccggacacccccagtaccgagaaaggaacaacaatgaccgagatcacccacactgccaacagcatccgaacccgcgccgaggaacgttccaacaaagcttggcgcctgaaggaggagatcatctccaagctcggtctcgagaccaagccagaatatgtctcggacaaccaaccgctcttcggacgtggccttgagatggattcccttgacactctcgaagtcgtcgtcgccgtcaacaatgagttcggagtctcggtcaacgacgacgacgtacaggcgttcggctcgatcaatgccatggtcgatttcatcgaggtgaacgagaagtgagttctcttgcgctcgaggcgccacccaaggacgcccgtaagaaattcgcctacgacagcgatgccatcaagacgatgctcccacatcgttggccgatgctcatgattgatcgcgcctacgacgtcgtcccagggaaatcgggcaaaggcatcaagtcggtcagcgtcaatgagccgttcttcgccggtcactaccctgaccattccatcatgcccggcgtcatgatcgtcgagtcgatggctcaactcgtggccgtcatctacgtagccgaggccattcagaacaatcccggcatgacgtcgcacgacgcacgttcaagcgttggttatctcggcgcgatccatcagatgaagttccgacgcctcgtcactccgggcgaccaactcaccctccacgcccagctcggcgagaaagtgggggctctgcgcgaggtttccgtgagagcactcaatggccgggatgtcgtcgcccagggggaactcgtcgtcaccgagcggtgacacccagccacacacgagaaggaagtcccatgatcgttcgcccctacaggccacgtgatgcggaagcgatcgtacatctctacaacagccattccgactcccccaatccagtgtcgggagggattgttgaggaggagttccagagggagctcgaagaacgtggttcgacagtgttcctagtggccgaggaggccggatccattgtcggcacattcgggatgttccgcacgaatggccgacacaccatggccgatgatgaagtcttcgccgacatgttctatgtcaccccgtcacatcgactctcgacagttccgggacagctaatcactgaagccatcagcgagtgcttcatccagggcatcaacgtgatccgcctcaccgtgaaccccgcgaacatctccgcgctcaaggtttacagaaaagtcggttgtgcctgtctcggggccaccgatgcaggcgaggacgggaacattgagctgtacaacttcatccctctggttcttagggcaaccatcaccaaactcgaccacgattgtattcgagccctggcggacatgacttcgttcgcctgcatcaccgagggacgtccacttgatctgtcccacgacttcatcgtggacgctggacggaagatcgtctcccacagcatccagatcgggcgttcaaccatccacgccatggtcgacacgggctcgaggaccattgtggaggccaccctcgacaaccgcgactgggatgctcctcgccagatcgtcgcccccaccccctgtcagaaccggcccgaggaacagcgaggcaaccctgtccggctggtgcacaagaagcttgaggtcaccttcaacgaaggagtcattgagatcagtacgactggccactggggcccggtcctcgcaatgtcctggccctcctccgtctcgcaccgcgctcacgggtggcgacagggccccgccaagtcgtatcgatgcgagcttctcgagaattgcctcgtcctggatgacgaaggaggagtgaaatgcaccatcagcctcaatgattgccaagtcgcgatccggatggatggtgccccaaaaacggaattgagaatgtaccagtggtgcagcctgcgccagggctatctgacggctgacaccggcatcacgagcttcaaccgggcatccagtgggctcggagtcgccgtccgggactcgtccgagattgtcgccgcgggccttcccgtcatccctgacacaccgatcacatggagtgagggtgacatcacggttcagctcgatccctgcggccgcgcctccctgatccactcgaccctggtggaccgaagaatccacttggacgagtctggctcggcaagtctcaccatgaccgtgtttggtgactcccagccccatcgtgccgacaccgtcgagctgcctcccctcgcggcaggcaccgacaggatcgtcctcaagccggctgccggaggcgtgaccacatggcgcttgggcgccaccaaggtgctcaagtcaccgtggccacacgcccgcgcgctcgggcccaatccgatctggcgagccggcctgtgggtcagtcacgagccggatcgccacgaccgtcgccaaggaatggggtggggtcccgatcatcgcagttggaccctgtcggaagacaccatgaccagtactgacgggacactctcctggcgcttcagcggctcccccgacaccggctggacggtcgacgtcacgacgagcaacacgcacggggagaccgtcgtctggctcaccccggactgcccggcgggcgagaggatccgcacgtctgatcatgccgtgacgaccatgcttgacatctcgaagccatggcagcgctggaccacccgatgcgcaattcctctcagacacgggaagtggttcctcatcgagcctgatcatgacctcactgattcccccgaaatcctcatgcgctctgttcacggggtcctgctcgtcggctgtgtcggacgagcccactccggatccgcttcctggcgctttgccatcacgtcagaactccccacctccaacccaagaagaaacgactacacctcagccgcctgaacccaaccagttggaacacccactacagaagaaatggagcaccaccatgtccatcactgagcagtacaagacccttcgcacctcggtcggcctccacacgcctaccggtcccctggtccgtatcaccggtgatgatcgtctcgagtttctcgacaccttcctgtcccgcgcctcggacttcgtggaccccgacaccactcgggagtgcctcgctctcaccgaggacggccttccgctgacgatcttcctccacatcgagcgcgaggaggagtcatggctccttccccgcaccgccatcgatgcggcgaccctcgccacgtacctcggcaacctcgagaccgatggtgacctgtcaatcgagattgctccagagggttggggagctgtcgctgtcgaggggccgctgtcgtggcagatcgccgaaaaccttctcgacttcgacgtggctggcctcgttcttcacgccgtcacggacgtcgtcgttcccggggcccccgagggatcgaaggcatggctcgcccgggtcggaaccactggggagtacggctacctgctcgtctccaacgttcccgacctcgcccgcacttatctcctcagccgcgccacggagctgggcggtcaggcagtcgacgccgatgctctcgcacgagtccaggccgaggccgggatgccctattacgcgatgggcgtgtgccacctcgatgtcgccgggggtgacctcgcctggctcgtggactggcagcgcatcggcgagttccaaggatccgagaatctgcccacacccgtccgagaccagcgccgactggccgccatcgccctgcccaccggcaaccgcccggaagctggtcagaccgtcgctgccggggatgaggagattggagtggtggtgtacgtcaccccgtccgccaatcccgatgaggaactcgcgttcgcacttctggatgctcctttctggactcccacccttccgttgaccgtcggtgcccacgacgggaccacggtcaccctgccccgcgtcgtggcagcctccagcctcaacaagctggggtgacagcgatgacgatcactgctgagaacgccaccacccgcagcgacattgcccggagcattgcggtgaccggcgtgggactggtcacggcacagggtgaccataccgacgagtgctggaccgaacttgtcgatggggtttgcggaatcaccatgaacgtcacgttcgatgactctggcaccacgattccgtgtgctggcgtggctcccattccgaactctgattcgatcgaccgctgttacctgctcggcgtccatgccatgcgtgaagctctcgagatgagtggcatcgacctggactccgtgggtcgtgatcgcatcggactcgtggtgggctcaagcctcggcgcgatgcccaccttggaggcggctcatcgccgggccattgagaccggcgtgctcgatgccggattggcggcagactcccagctcccctgcgtcgccgaccacctcgccgctgagttcgacatccgtggaccccgcgtcgtgacatcgaatgcgtgtgccgctggtgccgtggcgatcggctacgccgcagaactcctctggtccgacgatgtggacctggtcgtctgtggcggtgtcgatccactggcccagatctctgccaatgggttcacgtgcctgggagctctcgacaatctcccatgcagcccgatggccggttcctccggtctgactctgggcgagggagccgggttcatggtcctcgagagaacagatgcggcggctgccagaggccaggaggtgatggccgaaatcgccggctacggcacaagttgtgatggttaccaccagactgccccggacccgggtggcaatggcgcccgcagctcaatggaggccgccctgcgctcagctcatctcaagccgtccgacgtcagctacgtcaatctccacggcaccggtactccgaccaacgacgccgtcgagccgaaggcactccggtcattgttcaagtccgatgaccttccccctgtcagttcggtgaagggcgccatcggtcacactctcggcgctgctggcgccatcgaggccgtgtgctcgatcaaggccatccacgagggggtcctgccgccaaccgtcaacaaccgcgggcaggcttcccgaactggtctcgacatcgtgccggagtgcgcacgcaaggccgctcccgacgtggtcatctccaactccttcgccttcgggggcaacaacgcatcagtggtcatcaccgcacctcgaggaggcgttcactgtaccgccccggcgcagcttcgcgaggtcggaatctcaggaatggcagctctggcgggaaaggccgccaactcggaggagcttctttcggccctgtcagaagattgtccaatctggatggccgatgagaagacctgggaaggggatgctgtccaaaccggccatgtggacatcaagcgcctgtcccgcacaatcaacccgtccaaggttcgtcggatggaccccttgggaatcatctccagcgcggtggtgactgatctgtatgcccgacacgggaagctgagccgcaaggatgccgaaagcacgggaatcatcttcgcaaccggctacggtcctgtgacggcggtgacgcagttcaatgacgggatcatccgccacggttccgagggtgccaacgccctggtgttcccgaacaccgtggtcaacgcagccgcaggccacctcgcgatgctgaatcgctaccgtggttacacggccaccttggcatgcggtggaaccagttcactcatggcgctgcttctcgctgctcgcgtcgttggccgcggcgctgcggatcgcatcatggtcgttatcgctgacgagtttcccagcattgccgtccaggccgtcgcaaagcttcctggctaccgacacagggttgatggttccggagccgtgctctcggaaggcgcggtatgcgtcctggtggaggccgtcgaagtcgccgaagcacgcggtaccgcccccatggcgctgctacgcggcttcggatcccgtggagagtccgtgggagtcggtcacaccgcatccgatggacgggcttgggccaaggccatggccgctgcactgggccaggccggcctgactgcctccgacgtgtcgaccgtcgtggcggcatcaagcggacatcctcgcgtcgaccgagccgagcaggcggccaggcggatcgtcggactgtccgcaaccgctacgaccttcccaaaggcgattgtcggagaaacacacggatcggctgccgggatcgggctgttcggtgccctgtgcggttcgaggtcagccgcgcaccagaacatccttgtcaacgccttttcccacggcggtggttatgcctcgatggtggtggagtcactgtgaccacgacgcttctgccacgggttgcccagccgggaccgggcgtcagccatgtcgacaccgaccgtcccatcgagtgcatcatcacccaccacccccacatgccgcgtgatcgcggaggccacgccacctccgtgtcaggcaggtacttgctgcgccaagccgcagaactcatgctcggcacggatcctgcgcattgccccgtcgtcgacccttcgcggcgctggtactggcccggaatcaatcttcacggttctgtctcccatgtcccgggctggagcctgacgacgctgagcaccggcggccacatcggggcagacatccaggacttccgggagcgtcccggcgcaatggcattcatcggtgacctggtcaagctgtcgcgatcggcgtcactccgagaattcgcggagtgcgaggccgtcgtcaaggtgtccgaattgactaaggagacgttcgggcacgtgcgactgcccgaatggacacccggatggcgccacgttttcgaggactactgggtctggagtctcgagatgcacgggatgggagtcatcgcactcgcatccgatctcccccgagccattcgctggtggcggtgcgacgccgatgcccgtggccgtctccaggctctccgacccataagcagtcttggaccaggaaggccgtcatgagccggtactcacgtcgaatctcaggcatcgaacgcggctatctcaacgccgcaacccggggcccgcaccccaccatccacacgatgatcgacttcgagggccgcgtccccgccgactgttggcggcacgcatccacgattgcgtcggccgccaaccctggcatgacagtggtccggaggtcgggccgatggacatccgatccagcgggctgtccggttgtgttccacgactggaccgcggaccccaacgacgttgccgacttccacgctgacatggatctcgtgacgggaccatcgtccacgctccacgttttcgagggggcggaacgcacccgaatcaccttggcagcaagccatgccgtgaccgatgggcggggcatcgaacgatttctcgtcgacctgcttgcagcgttggacgagcgtgaacccattggaagccccgacaccctgaccgatgtcgatatcaaacgatccttggagaacagcatcaagccccgacgccacctggccgctgtgcccgccgatgtcctttctccactgggggggaggaagaaccaacgtatatgggcctccaggacgtggcacagtgccccgggagccatgagcggaagaatcgctgccgctgtggccgagatgatcgaccacgccgcaatgatcatcatcccggttgacatccggcggcacgtcccagaggtccgatccacagcaaacctaagtgcccaactgccagtgatcatcaccccgaaccagcgctggcaaagcatccatgggcatctgctcacggaccttgctcgccatcgagaccttgcgatcatcagtgaggatttccgccacaacaatccgttcgcatcgaccttggaggaaagccaggccatcggcctcgatggtgtctatccctgtgccgcaatcatctccgaccacgggaagctcgacctttcaaggttccagaccttggaactcaccccggtctcgatgcgaagcctcccgatgctcgttccctactccgcaatgttcatcagcagttgcaccgtcggcgagaccaccactgtcaccatcgctcatcgcgctgatgacgatcccgattccataaacaccttcttccaccacatcgaatcccagatgtccatctgagccacgtcgtccctggagagcaaacatgaccacccaagatgtcatcaccccgccgcgccccgtcacctcccatgccacggcgaccaggtccgaggctccaccgcgaagcgtcatcagagccatggccatctcgatggtcgcgaccctcatggtcatgctcgacacgaccgtcgtgaacgtgtccttgagcgcgaccaccgcccgcttcgggagcatgggcagcgtgcagtgggtcctcacaagttacctacttgcactgtgcgcgacgatgacggcctccgcctgggtcatcgaccgccttggtccacggctcaccttcatcgcctcaatgaccatgttcctcatcggctcggtgatgtgtgcactgagcgattcagtgtggcaactcgtcactggcaggaccatctccggtgccggagctgggatccttgttccgacagcatccgtcctgcttatccgtggcatcccacgcgaacaacttggcagggtgcaggcactgaatgggagtgtccagttgatcgctcccctgatcggcccgactgtgggcggtctcctcgttgacaggtgcgggggctggccggccatctactgggcgaacgtccccgtagctcttgttcttctgattgaggccgtccgcgtcgatccggacgaaccacacaccgctaagcgccgcctcgatgctctcggcctggtctgtggcagcaccgcgatcgtgctgacagtgcttggtgtctcactcttcggcaggacgtcgcgaaacaccaccttcctgcttacgatcggcgcgcttgcagtcctcgcatgggcgttcttcatcacccacatccgaagggctaccaaccctctgcttgacgtttccctgtatcagaaccctgtctattcatggtccagcttcaacgtagcggtgcttggtttcggtctctacgcccccatggtcgtcatgcccctctatctcgaggcgacgcgccacctcactgccgtccacactggtctggtgatgtcagtggccggcgtcggcgtcattatggccggaatcctgtgcacgaagatcatgggccggatcggtggaggcctcacgatgacagttggcataactctgagcatcatcgccactctgcccctggtccggctgacgaaccacacctcctacatactcctggcagtctgcttggccttgcgtggagcaggaatcagcctgacaatcgtcccagccatgacacgggccttcgagtccatcaagaggacggccatggcggacgcctctgcacagctcaacctgttgcagcgaatcggcgggacaattgcgacagcagtcatcatcgcagttatccaccacgaggccatgctcacccgcggactctcccccacagtgttctcgcacgccaacgtgtggatcctcaccgcgaccgccgtcacccttctgccggccttcgcgcttgcgaaggccgaaagacaacagcaggatctctgagcaccgaggagtactccctcgtagaccctcctctgatctaattgggttcgttccaagtgtgtatctcactccggggagccccgattgctgaaccacatcccgttcaccctggcgagtccctcgtggtacgacgtcccctgggcgcccggatctccgtatctcacaggagatatctcggtcctgccagcggactcgccaaggtggacgacgaccatccggggtccttggcaaatccacatgccacctcgtccgacccttccagaggtggggtggaaagtgcatgtgtctgccaagccatcggaattggaatcggttgcctcagtcgtagcactgtggtgcgtacgccacagcgtccccttcaaagtacttcgcacccgaggtctcgttcacgcgagtcaagtcaagtatgcggaccgaagtcagagcggcaaggtctgcacctgctaccccgacggcgagagccttgagcacttctgctccggtcttgccgagctgcttcagaacgtcgattcacctccggtgtccggcgagctgcgagtcggatcctcccctctgtggttgcgtcacgggagtttccgagaggcatgggcggtgtcatccacaggagtaccgttcccggtctacccgggaacaacacatcctgatcgtcgaggccccgcgcccgcagaatccgatcacgacacgccgtggatccggaggctccgtcggacgaatcgccccagcacggttcttcccatcgacgatgtcagactcctccaccaatcaaatgctggcggcgtgtatcaggcaacatggagagacggcacatcggtagtcgtcaaggaggcccggcacctgtccggacttgatgcggcgggtgtcgacgcccgagtgcggctgcgtcacgagtacgaggccctgagaagactggacccctatcgggccgctccccatcccattgatctcattgagaccgaggacggctcgttcctgatcatggaattccttgacggaatgacagtccaccaggagatgtcgaggttccatcctctgattggtaggcgacctcatcggctatcgatgaccgatttttcacgctggtgccgagaggtcgaagatcgcttgaggaatgtcacgagggtcatggccgggtgcggaatcgttcacggggatcttcatcccgcgaatctgatacatgtcggccatgaggttttggttactgactttgaatcctgctcaatcgacggggtcgccgtctcgtcagggatcgccgctccctggttccagtcggacgacacgattcccgatccggcgacgactgacgatctccacactcttctcgtggatccgacttgcggccccgcgcttgtcctccatccaaatcttcgcgcgctcatcagccaggccgcagtcgaggacatgatgggaaatccgactggtttaccacatgcctggaacctcgaggacgtgacaagcgaactcgccaaggggatccgggcatcagccactcccgcacgagccgaccgcctctttccctcagacccctacctgttcgggcatccaggttcagaattcggcctgatgcatggcgccgccggaatcatggctgctcttgccgtgactgggtacggtgttgacgcgaatcacgtgacctggatgaaggaccgcttggccacccgcccgaccctgctgccggggttggccaacggaatcgagggaattgccctgggtctctccctgtgcggtcagaacgacatggctgcatccctgctccaccagtccggaattctcacgatcacaacgaacggatcgactgacctcaccctcggtactggtatggcgggccgagcgtgcgcgctgcagtccctctcacaacgactgtcatcgaaatctctcgcccacgctgcatataccctctgggaacaactcgccgtggctgtgcggaacactgatgtggccttgccgaacggcctgttctccggttgggaggggatcgggctctccctgcttgcctctcccctgccggatcgtcatgatctcgcccgccactcactccgactggccctggccacgacaacgattgttgacggtgcgctcttctcaggcgagggacagatccgatggccatatctggggcgtggtcccgcggcatgtggcccgctcgccgccaggcttgatgatgaccagacggccaaggccgtggcacagacctgtcgttgtcccctgactgagtcatccggtctccacaatggccgcgcaggtctcctactcgtcctccgccagctcgtgggagaccaagacgacgccgttcgccgccacctcatgagactgtcgtggtcgatggaccgtcgcgaggaaggcacattgctgctgggtgatcatggcctgcgtttctcatccgatctcgcgacggggtcagccggcgccctcctcgccctgagcagggacccatggcggaacatgacacgaatgctcggaatatgcgatgacacctgtcatggcccactagtgacagtttgatctagcgccgatagttcacaactgaaagactccaaacatcgaggaaaacatgctgagccaaaacgccttggcaggcgtggctcgtttcaccacgatgaacaccaggagacagaatgtccgttgaggccatgcaatccatcgagatggacgaggaaaacagcgccagccagacagtttgcgcttgttacagcttcttctcgtggtcaggatgctgcgtagtctcccaagcggtggaagcatcttgatcgtgtgagacgccgtcgactaccctgtcccccgtggtacgcacacgccccgtcctggacagtcccggaagaccgctcatcgcctccggagtcgtcctggcggtcctgctcatcatcgcggtgatgacgatggtgcttcagcgcgaccccactctcacccccggacgccgcattctcggtatcgtcctgtccacggtccaggccgtcggattcatgtggctgcagacccgcatggttcgtcacggcaagggttcgcgcaacatgcgtgcgacccttggaagggtcggtttctgggccacgtggggactcgtcgcagtgggagtcgtcaatctgtggctgaccaactcgtggaccctcttcggggcctccgtcgccacgcccctccttctcctgccaggggtgtggagtgtggtggccaccctcgtgaccctgatcgtcggtttctccgacctcgtggtcacccacacctcgccactgacctcagccacggtcgtgctggtgaccatcgcggtgtcggtgaacctctacgcattcacgaagctgtcgacggcactcgttgaactccgctcctcccaggaggagatcgcccggctgcgcgtggacgccgagcgtcaccggatatcgcgggacctccacgacatcatcggtcgcaccctggtcgccacgtcgatgcgccagcaggcggccctccacctcgtcgaccgcgacccgcaacgggccaaggaacagctcgacgccgcccatgacgcaatcaccgaggggcagcaccagttgcgttccatcatccaggccgagatgagcaccagcctccccgacgagatcagcgacgccacattcctgtgcgaccgactccacatcgacttccgcatggatgaccgcggcagaccgcacaaacccttcgactcggcggcggcggcggccctgcgcgagggaatcacgaacatgctcaagcacagcgcggcgggctactgccacgtcgccatctccccggacctcctgaccgtcaccaacgacggttgtccgcaatcacctcgcccctccaccacaccgggcaccggaatcgaccatctccggtcccagatcgaggcgctcggtgggtcggtgacgacgtcgcggccctcgcggggcaccttccggctccgctgctccttcccgacccggggggcgtccacgaccacacccgcgaccgaaggaggacgatgacgacgagaatcctcctcgccgaggacatcaaactggtggcagaggccttcgaggcactgctctcggtggaaccggagttcgaggtcgtcgcacgggtggcacgcggcgacgacctggtcacatccgccacccgcctgttccccgacgtgatcctggccgacatcgacatgcccgggatgaccggcatcgaggccacccgaatgcttcgcgacaagggataccgcggcagaatcatcctgctcaccgccctgccgggaagcgggcacctgcacgccgcgatggctgccggagccgacgggtacctgctcaagtcgatcaccgcgccctccctcatcaacgccatccgggcggtgtgcaacggccagtcggccatcgacccgaacgtcgccgcggtcgccatgcgcaagggaccctcgcccctcaacgaccgggaaaccgagattctgcgcctagtcgccgacggttcctccaccgcgcagatcgcctcgcggctgtacctcagcaagggcaccgtcaggaactacctgtcgacggcgatgtcgaagctcgacgccgactcacgcacagcggcggtcacgcgggcacgcgaggagggctggctgtagcaggcgacccgctcagcccaccgcccctcagcccaccgcccctcagcccgccgactcctgacgcacggcctcctcgaccgcccggctgagcagggacccggccctgaccatcgacgtctccgggtccggctcgaggtcggacaacgcgatgatccggtcgaacgcggaccgtttctcctcgggcaggtcacagcgtccgcacaccgcccagacgggcaccccggcgtcccgggcgatcttgcggatggtgtcgagaagcttgccgagcagggtctgctggtccagccgcccctcccccgtgacgacgagactggaggcggagatccgcgacaccgcgcgggaccatcccaggacgaccgccgcgcccgggcggtacctggtccccaggcacatcagcgcccagccgacccggctgggcggctgcgaaccccctggccaccgcccggcaggcctttcccgaactcagcgaccccttgaaggagtcgacggcaacgatgaccggcgcattcggatcaggacgcatgggatcagcatgtcacgtcgatacggagcagtcgcgccgcctacccctagactcgggggcatggtcaaccgagtctacctgtccctgagcgttctcgccctcgtgctgtgggtggtcgcctaccgtcacatgccgggctgggccgcgggcatcaccctggtgggcatcgtcgtgctgtcgctgtggtgcgagtggtcgcgggtgcgcaccctggccaggatcggcaagtcccgccagcagggcccccgctcctcccgaggacgcaacctgtcgtgagcaatacgattcccgcagccctccaccccggccctgacgaggcc

SEQ ID NO: 433 - DNA, 26636 bp, Propionibacterium acnes
  source 1..26636: mol_type = genomic DNA
ccttgtggacaccacgtcatccacatgacttgtgtcacatgattcccggaccatcatcaagcagatgctcacccaactgtaatgatttctgttctgaatctggacatgctctgacctgcattcaatgatcaattccgtgcgatattccacaacgcacggagaggtcgcagacaatgacaacagaaagcatccccacgcggctgctcgtgtggcacgagcagaccgatccgaccaagctcctcaggatcaccgacgcgatcaggaggggggatccccttccccccatcgaggccatggcgatcggccacaaattcctcgtcctcgacggtgcgcaccgggcccaagcccaccagtactgccatcgatctgagatccgagcccgcctccacaacctccccctcagcgcggaagtaccaggctggagccactccataccccgcgatgcagcagcgaaactggctcacctactcctccccgtggacgctctcggtcaggcggaacatcgtcctgcacggggtgcgccgtcaggtggggaccgcttcacaacgaccgcgcgacatctttctcgcctgccaccggatcgcgcgagttgcctacgcgcatggaatcagacctctcggcccggagttctccaacgctccgacgatcgacgccgccaccatgacctggcccccgccgaacgtgggcacgttgtgggccatcgccagcagtctcggacccctgcccgcaactgtgacccggttcgccccgatcctccggcacgacgccatcggggattccgcgatgacacccgtcacctccgccgcgtgacgacccgcgccaattccgccccaccactggatgaggggcagccgcgtggacgatgctcctgttcaggcagggactccatacgagaccaataggaaaatcatgatcaaaaacacaagccctctgaccgtgaaaaatgtctcgaaaacattccgtggctccagcggagaagccatcaaggccgtgcaagacgtgtcattcaccgttgagcgtggtgaggttgtggcattcctcggcccgaacggcgccgggaagtccaccaccatcgacatggctctcggcctcacccgccccgacagcggccagatcgaggtcttcggtactgacccgctcagcgcggcccggtcgggacgctgcaccgcgatgacacagaccggcgggttgctgcccgacctcacgattgggcagaccatggagatcatctcctcgctctatcgtggctcccacatgaatgcctgcatggagcgagcaaggatcacgcatctggccgatcggcaggtgtcgatgtgctcgggaggcgagcgccaacgacttcgcttcgcactggctctgctgcccgatcctgacttcctcatcctcgacgagcccactgcggggatggatgtggaggcgcgccgggacttctgggcagagatccacgaggacacgcgtcgtggtcggacaattctgttcgcaacgcactacctcgacgaggtggacgagttcgccgatcgggtcatcctcatcaaggagggccgcgtcatcgccgacgacacctccgacgcgatccgcaccatgtcggggggttgcaccgttacggcgaccattcccgacttctccctggcacgactgaatctgccgggcacccaactcatcaagcagggcggcgcacgcgttgatctgcaccatcccgattccgatgccctcgcagcgcgagtcatccagctcggcggcaccgacctgcgcgtggtcccccgcagcctcgacgacgccttcctcgctctcacctcaaccaccaaggagtcctgacatgaccgcccaagcgcttcccgcagtcgccactcccaaggcccgccaccgatccgccatctcgctgaagtacttgtggtgcgagatgcgtcgccccttccggcgttcgacgatgctgttcaacctcgccctccccgcagttctgtacctggccctgttccgcaccgtccacaccgccgagctgccggacgggaacttcgcgatgtggatgatgatcggcatcgctgtctacggagcggccactgcgagcaccagctacgcagcctccatctccgtcgacgaggccaacgggtggacccgcaccatccgcctgacgccgttgtcgtcggtcgggtacgtgctggtgaaggtcctctgcgccatggccatcgccctggccccgaccctgctcatcggtctcatcgggctgttgaccggagctcacggcacgctgcgggtctgggtaatcggactgggggcggcttggctcagctcagcaatcttctccgccttcggcctggctctcggactgtccctgcgtcccgaggtcgtcatgcacgtccccggcctggtcatcaccggtctggcgttcctgggcaacgtcttcgtccccctcagcgggacgatgctcaccattggccgctggagccccgcctacggcatcaccgcgctggctcgttacccgctcaccaacggcatcgacatcgggggcggccacgactccctgacggctgccctcatcggcaccttctgctggttcgccggattcgtgttctgggcctcccgtcgatttaccaagagcacgggtcgtcagtgacagattcggccgatctccggaaggagcagtgttatgaccaagcccctcattgcagtggtcaccgcgggccaaggagcgcagaagcctcgcctgctcacgccatggctcaaggtccccggcgtcacggagaagcttgctgcatggtccgctcaggccgatgtggacctcgtcgagctcggtaccagggcgaatgcagaaaccttggcagcgaccgagaatgcgcagccactactggtctgtctcggagtcctcgtctcggatctcctgaccgaccagaacattgtgctcgcaggacactccgtgggcgagctgacagcagcgtgtctcgccggggtagttgatcccgggacggccgtcactcttgcacgacggcgtggactggccatggcgcgggcctgcgctctccacccgaccaccatggcggccatcattggtgacaatccggatgacgtcctccggcggctctcggaactgggactcacggctgccaacatcaacggaggcggacagattgttgcggccggctccaccgacgcgatcgcggaactggtggcgacccctcccaacgggaccgcagtcaagccgttgcgagttgctggcgcctttcacaccaagtacatgacacctgcgcaggacgctttcgcccaagctgctcaggacgtcaccttctccgacccgcagcacccgatcatctccaacctcgacgggcaggagatccggtccggcaatgacctgcgtgaacggctgattgcccaggtgaccgcgccagttcgatgggatctctgcatccagcagatcgcggatcgtcagccggaactcgccctatcggcccctccggggaaggtgcaggcgtcgctcttgtctcggcagatcccggacctcgcgacggtctgcatcaccacaccacgggaggcagcccaggctgcacagcggatcgaccagtccgtatccgtccttcagggggcatgatgctcatccccgagtacttcctcacagcctgttcggaccatgctgagcgcctggcgatcatcacccacaatgacgttgtgacgtgggccgaactggcgactcgcgtcgacggttttcggcgctggctgcgggaccatggcgtgcaccgccaggacagggtcgttctccagacgccaagcaccgtaggcacggtagccctcatgtgggcctgcctgctcgacggcgtgacgatggtcccggtgcaccaggacctcactgcctcccaggtgcagcaagtcatcgacgactgccgtccagctctggtgtgtggcagcccggacctcgtccaactcctcaactcccccggaatgaagacaagcacacctccaacgcggccggagtcaacgagtattctgccgtccttgtcccgggtcagccccgatgaccttgcgatgctcatctatacgtccggcacgacgggtctcccgaaggggatcatgtgtccccaccggcaggtcgccaccgccgcacggatcgtccatgactgtctcgggtaccgcacggacgacgtcattctctgtcgcctgccgttgtccttcgactacgggctctatcagattctgatgtctgccatctccggtagcgcggttgtcctgcgggacggaggcgcgcaggaccgcaacctggtgcgcgacatcgcccgtcacggcgtcactgtcgttccagtcgtgccgtccatggcgtcaatgctcatcaccctgcagcgtcgtgatcagttgccgaccatcgtcagactgttcacgaataccggggcgcgtctggcacccgagaccgcgaaccagttgctcgcaagcttccccggctcccgctatgcgtcgatgtatggcatgacggagtgcaagcgcatctccatccttccggtggaggagtacgagacgcatccggacagcgtgggaagagctctgcccagcactcacgtcgagatcgttgacgctcagggagttccggttccggcgggcgagcacggggagatcacggtgtccggcccgaccgtgatgaacggctactggcaggtgccgaacagtcccagtggacgattccgacccagcggccacggcctcactctgttcaccggtgatcgcggctggatggatgaggagggacgtctctacctcctcgggcgcgacgacgagatcgtcaagcatcacggcatccgaatcagcctgcaggagatcgagatagccgccgaagccgcgccgggcgtcgacgcagtcatcgctctcaagccggcctccgactcggcccccattgaaatcgcctactgcggcagcacgagtcccgagaacctggcccgccatctcgaaaccgtcctggaccgggcgcgacgaccccaattcatccaccaactccagcagatccccctgacccgtaacgggaaaccaaaccggtcagcagccgccgaggccatccgctcaagggcgtgacggcgaaggccaacacccacagacgaaaggaaaccaccatgacccaggccgagttcaaccagttcatcgagtccacctgctccgcgacgatcgtggatcccgaccgtcctttggtcgatcagggcatcgactccctcggaatgctcaccctcatggtcgctatcgaggacagcctcggcatcgaactggatcccgagtccctcgccgacggtaggggttccacgccctccggtcttctgtcccttgtcgagcagctgaaagcgacggtgtgacgacatgacgacgatggttccttgccgccgtgtggagatgccgcaactgttcgaccacatccccggaagcatctctctctcaggagggctgcccgatctgagcgtgctcccgagcaatcagatcgccgaactgacgtcccggatcatgcgtctcggctcaagaatcctcctgcaatactccaccccttcggtctcgtcctccttggtgccggccatcctggacctggcggaacgaacatgcatgtcaccggatccgcggaatctgatcccgaccgcgggttcccaactgggcctggccatggtgatcaatgcctttgacggcgatgagatcatctgtgactgcgccacctatcccggggcgctggccgccttcgcctctgccggcgtggaaacaacgggggtggccagtgacgaggaggggctcaacccagacgcgctcgctcacgccgtcgcagagggtcgggccaatggccgccgcatcgcagccgtctacaccacgcccaccttccagaatcccaccggctccgtacagtccgagaaccgccgtgcggccctgctcaaggtgtgtgctgacaatgacctcctcctcatcgaggacgatccgtacggcatgctgtccttcgacgggcagacgtggccagctctgaagtccatggacccacagcgcgtcatctacctgggcaccttctcgaaggtgttcgcaccgggcgtccgttccggctggatcgatccgcccgccaatcttgtcgagaaactccgcgctgtgtgcgagatcatgacactctcgccatcagccctcaaccaagcgatcatcggcgagtaccaccgtcgtcacggatgggacgaactgttggagggctatcgcgcctcctaccgcgaccgagcccgtctcctcatcggggctctcgaggctgaactggcaagaacgaattgcactggcacgtggacctggcgtgaaccacggggcggcttctacctgtggttggagaacgtcgccagcaccagcggtatcgacgttgcgcgtcgcgccgccgacaacggagtggccgtggtgcccgggaaacacttcgacgcagccggacacgattcgccgagcctgcgggtgtcgttcagcaattcacgcccggctgatctggtcgaaggagctcgtcgtctcgcccgtgcactggtgggagaggacgttcagaaatgactctcgcgacacgcaccgccaccgacaccctgcagcagaccttgccctggggcacccacgaacgtctcgtcttcgggcgggcgctcctgcgcagcaccggcttcccagccgaaggcttggccctgctcgactccgacgacatcctccccctcctcgactcctttcttgccggggacatcgacagaactcacttcgagaaggaatacaccagtcgcgaggagtccggcgcaagggcgctcatcaacgtcttgaaggacgatgcagtatcgcgcgccatcgcatggcagaaccccaccgcgtggaggtccttcgaatccctgtcgtccacgagcggaatcaatgcttcgactcggcgcaaggtacgccaactcgccctctactggcaacgttactgttccaaggctgagaccattggatacttcggcccgttcgcctgggccgaagtcgacccggaggcctctgcggtcgaattcatctcctccgaccatctgatcgaccgttcccacgtcgcaatggaggcgtgggcggtcattgagatcgggaaagccctggcatcacgggccgaccttcagtggtggatgccaccaatcctgtcccccgccgtcgacctcaacatggagagaggcaccgtgacggtggctggacaccagccacgacgggtccgggaggacgaggcacgagttctcttcctgaccgacggcacccgtcccgccgcccagatcgccaagagcctcgacatggagcccgagcggttgcgcaggatcctcgtggcccatgaacgtcgtcacaccgtgatctgggacgccaacatccctgtctcagtgcacgcgtgggacatcctgcacgaacgcattgcccagatcggagacgctgggctgcgagatgaggccactgctgttctcacgaggttcgacgagcttctggaggtcatccgcaacattcccgacgcccggtccctgacggaggcgacggaatccctgtcccgtcttttcgaaaccgtgacaggaacctcttcgaacagacgtgcgggccaggcatatgcagcccgcagcctgtgctacctggactgcacccgcgccggaaccgccaaggttgggacccggcttctcgaagccctcgacgcccccctcaacctcgtcctacaatccgctgactggttcgcggcgaccttggcaaaggaatacaccaccgaaatcacggacctcgcaaatcgaaagcagcgggcctcccaccagccactgaccatggctgatgtctggccgtccacgatgtcgctgttctggggggactcaccgtccccactgcagcgagccgtgaccgaactgtcacggcggtggagcagagtcctcgaggggctgcagccagtcgacggtcgcatcgacacgacatcgtccgctctctcgggcgccgtggacgagcagttccccgtgtgcaccccgattccagaactgtcagtgcacagcccggacctccaggtcatcacctcgagcactagcaacatcgcctccggacgagtcactgcagtcatgggtgagctacatgcctgtctgagcagtctcgacatgccgttgctcgagtggtcgctgccccatggttccattcgcgatcgcatcaacaccgcgctcaacctgcgacgtctggttcccttgttccccgagacatggaggcgcaacaccggccgcatggttccagcgacggtcggagtgggggatcgcgcaatcgggttcactcggacggccgatcaagaccgtgcgaacacatggtcgatgtcggcactgctgttcgagcagaccgaggacggactcatgatccgtgatcccgatggcaggctctggaccatcgcacaagcgtggagcgtgcccatctccatggtcgccgccgatgcgttcaagatcgggctgcccggctcaccagcccctcggctcaccattgacaatctcgtcgtgttccgtcgtacctggaggtttcccgctggctccatcgacatcatgcacggttcagccgccgagaaacacgctcggctgagggagtggcaggtcacgaatcaccttcctgaccacctcttcgtcaagttcccctccgaacccaagccgatctacttctccttcgagtcccccgccatggccacggtcttcacgcgatcactgcagcgcgacgcccgagagaatccagacagtctcgtgacgatgtccgaagcactgcccgagcctcaatcctcatggctgcacgacacccggagccaccactacgtccacgaattccggctgcaactgaccaaggagcgacatgacgaccacagttgagacacatcccgaaacacgtggcacaaccgcgacatccatctccaatctgatcggtcacacccctctcgtaagaatggaccatctgttcgacggcctccccttcgaggtgtacggcaagctcgagaagctcaatcctggcggaagcatcaaggatcgagcagcacaatccatgatcgaacgggcaattcgacggggtgagatcgtcccgggccgtacgaccgtcatcgagtccagttcgggaaatctcggcatcgccgtggcgatgctgtgccaggagcacggcctgaatttcatctgcgtaaccgatgccaaggccacgccaacgaacattcgactcatcgaagcgttcggggccactgttgaggtgatcgaagaacctcatcccgagagtggcgaattcctccccatgaggctcaagagggtaagagaactgctgtcagagattccagatgcatggtggccgaatcagtacgggaaccccgacaatccggcggctcacgagcggactgtccgcgagatcatcgaggcaatcccgcgggttgacacgattgtctgcgcgaccggctcgtgcggaacccttcgcggctgccacgaagcattgcgaaagctgtccccacgcacccgactcgtcgccgtggacgccaagggcagcgccatcttcgacgaggcaggagcaccccatccccgctgtgtcccgggacacggtgcgtcagtgcgaccgccgctgtggcgcgcggggctcgccgaccaactggttctggtctccgacgcggactgcgtcgtgggatgccaggaggccctgcgcaccgaggctcttctcctcggcggatcctcgggagcaattctgacggccattcaccgagtgtctcccacgattcccgctggttccaccgtggtgacgatcctccccgacggcggcgagcgctacatcgacaccatctacagccgctcgtgggtcgactcacacatccccgggctgccctctctcgccgactggggggctcccaaccccgccaattcgtatgacctgaacagaagtgcctcatgaagctctacaccagagagaccgtcgaaactgcgcttgtcgggcgtcatggccaggttctcagtgccgtacagagtgcatacatgctgcattcgacgggagagacatcgctgccattctcaaccttcctccgcccggccgggtatccgaacgatcggatcatcgcacttcccgcccacatcggaggcgacttcgacatagccggtatcaagtggatctcatccttcccggaaaacctcgaccggggccagcaacgagcttcctccgtactcatcctcaatagtctggagacgggatacccgaccgccctgctggagtccagtcagatttcagcaacgcgaacggcagcatcagccgccctggccagcgccaccctccatggctccgaagaccatgtcagcacgattggcatcatcggctgcgggacaatcaatcttgcaacgatcgactacctcttccacgtgcacccccagatcaacgaggtcctctccttcgatctgaggcgggagcgggcccatgagttctcgcacctcgtcaaggcttcgcacccagaggcccgggtccgtgtcgccaaggagcccgacgagattctggccgcaagcaacaccatcgcgatcgccacgaccgactcgagtcattggttggaccttccgccgtggcacgggccggggcaccaagtcgtcctgcacacgtcgctgcgagacctgtcagtgccctcgatcctggcagcggccaacgtcgttgacgatcctgatcacgtctgccgtgaagcgacgtccttggatctggcaactcagcagaccggcaaccgggacttcatcacggggagaatcggagacctccttcttggcgcgccgctgtcctcaagtcctgactcccgtgtcattttctcacccttcgggctcggcatcctcgacctcgcagtcgcctccgtcgtcattgctgccgcctcctcttcagcagtcgagatcaatgggttcgaccccgggaaacacgccacaagcatgattgaggtgaatcgatgaccaccacacagatcaacgacaacacggccgttctgcgcgacgtattccccgccggctccgtcgcattcgtgagcggtgcctcacgcggaattggcgctgcctgcgcgacagcccttgcggccgcgggatgcaacctcgccatcacttatcgaaggaaggagaacgaggcggcacaaatcgccgaatccattgaagccatcgggcgccagtgcatcacaatgcagatggacgtaaccgatgagaaccaagtgaccagagccttccgcatcattcgccagcattacggacgcctggacgccgcggtcttgaactcgggaatcaccagtgacgggcatcttgcaacaatgagccgctccaagtggagctcggtgatcgacacgaatctgaccggaaccttcctctgcacgcgcgaggcgaccaaggccatgtactcgtccggtggctcgatcgtcatggtcgcgtccaccagtggagttgcagggcgaccgggccaggccaactacgcagccagcaagggcggaatcgttgccatgatgaagacgctggccccggaggttgcggcaaagaacgtccgggtgaatgcggtggcacccggcttcattcagaccgacatggtggcggccgttccaaaagcggcactcgcccaggcaatccaacacatccccatgggccgtcttggcctggcacaggaggttgcgtcagccgttaccttcctggcctccccgctcgccgcctacatcacagggaagaccctcactatcgatggcggaatgatcaacggctgaccccaggacccggacacccccagtaccgagaaaggaacaacaatgaccgagatcacccacactgccaacagcatccgaacccgcgccgaggaacgttccaacaaagcttggcgcctgaaggaggagatcatctccaagctcggtctcgagaccaagccagaatatgtctcggacaaccaaccgctcttcggacgtggccttgagatggattcccttgacactctcgaagtcgtcgtcgccgtcaacaatgagttcggagtctcggtcaacgacgacgacgtacaggcgttcggctcgatcaatgccatggtcgatttcatcgaggtgaacgagaagtgagttctcttgcgctcgaggcgccacccaaggacgcccgtaagaaattcgcctacgacagcgatgccatcaagacgatgctcccacatcgttggccgatgctcatgattgatcgcgcctacgacgtcgtcccagggaaatcgggcaaaggcatcaagtcggtcagcgtcaatgagccgttcttcgccggtcactaccctgaccattccatcatgcccggcgtcatgatcgtcgagtcgatggctcaactcgtggccgtcatctacgtagccgaggccattcagaacaatcccggcatgacgtcgcacgacgcacgttcaagcgttggttatctcggcgcgatccatcagatgaagttccgacgcctcgtcactccgggcgaccaactcaccctccacgcccagctcggcgagaaagtgggggctctgcgcgaggtttccgtgagagcactcaatggccgggatgtcgtcgcccagggggaactcgtcgtcaccgagcggtgacacccagccacacacgagaaggaagtcccatgatcgttcgcccctacaggccacgtgatgcggaagcgatcgtacatctctacaacagccattccgactcccccaatccagtgtcgggagggattgttgaggaggagttccagagggagctcgaagaacgtggttcgacagtgttcctagtggccgaggaggccggatccattgtcggcacattcgggatgttccgcacgaatggccgacacaccatggccgatgatgaagtcttcgccgacatgttctatgtcaccccgtcacatcgactctcgacagttccgggacagctaatcactgaagccatcagcgagtgcttcatccagggcatcaacgtgatccgcctcaccgtgaaccccgcgaacatctccgcgctcaaggtttacagaaaagtcggttgtgcctgtctcggggccaccgatgcaggcgaggacgggaacattgagctgtacaacttcatccctctggttcttagggcaaccatcaccaaactcgaccacgattgtattcgagccctggcggacatgacttcgttcgcctgcatcaccgagggacgtccacttgatctgtcccacgacttcatcgtggacgctggacggaagatcgtctcccacagcatccagatcgggcgttcaaccatccacgccatggtcgacacgggctcgaggaccattgtggaggccaccctcgacaaccgcgactgggatgctcctcgccagatcgtcgcccccaccccctgtcagaaccggcccgaggaacagcgaggcaaccctgtccggctggtgcacaagaagcttgaggtcaccttcaacgaaggagtcattgagatcagtacgactggccactggggcccggtcctcgcaatgtcctggccctcctccgtctcgcaccgcgctcacgggtggcgacagggccccgccaagtcgtatcgatgcgagcttctcgagaattgcctcgtcctggatgacgaaggaggagtgaaatgcaccatcagcctcaatgattgccaagtcgcgatccggatggatggtgccccaaaaacggaattgagaatgtaccagtggtgcagcctgcgccagggctatctgacggctgacaccggcatcacgagcttcaaccgggcatccagtgggctcggagtcgccgtccgggactcgtccgagattgtcgccgcgggccttcccgtcatccctgacacaccgatcacatggagtgagggtgacatcacggttcagctcgatccctgcggccgcgcctccctgatccactcgaccctggtggaccgaagaatccacttggacgagtctggctcggcaagtctcaccatgaccgtgtttggtgactcccagccccatcgtgccgacaccgtcgagctgcctcccctcgcggcaggcaccgacaggatcgtcctcaagccggctgccggaggcgtgaccacatggcgcttgggcgccaccaaggtgctcaagtcaccgtggccacacgcccgcgcgctcgggcccaatccgatctggcgagccggcctgtgggtcagtcacgagccggatcgccacgaccgtcgccaaggaatggggtggggtcccgatcatcgcagttggaccctgtcggaagacaccatgaccagtactgacgggacactctcctggcgcttcagcggctcccccgacaccggctggacggtcgacgtcacgacgagcaacacgcacggggagaccgtcgtctggctcaccccggactgcccggcgggcgagaggatccgcacgtctgatcatgccgtgacgaccatgcttgacatctcgaagccatggcagcgctggaccacccgatgcgcaattcctctcagacacgggaagtggttcctcatcgagcctgatcatgacctcactgattcccccgaaatcctcatgcgctctgttcacggggtcctgctcgtcggctgtgtcggacgagcccactccggatccgcttcctggcgctttgccatcacgtcagaactccccacctccaacccaagaagaaacgactacacctcagccgcctgaacccaaccagttggaacacccactacagaagaaatggagcaccaccatgtccatcactgagcagtacaagacccttcgcacctcggtcggcctccacacgcctaccggtcccctggtccgtatcaccggtgatgatcgtctcgagtttctcgacaccttcctgtcccgcgcctcggacttcgtggaccccgacaccactcgggagtgcctcgctctcaccgaggacggccttccgctgacgatcttcctccacatcgagcgcgaggaggagtcatggctccttccccgcaccgccatcgatgcggcgaccctcgccacgtacctcggcaacctcgagaccgatggtgacctgtcaatcgagattgctccagagggttggggagctgtcgctgtcgaggggccgctgtcgtggcagatcgccgaaaaccttctcgacttcgacgtggctggcctcgttcttcacgccgtcacggacgtcgtcgttcccggggcccccgagggatcgaaggcatggctcgcccgggtcggaaccactggggagtacggctacctgctcgtctccaacgttcccgacctcgcccgcacttatctcctcagccgcgccacggagctgggcggtcaggcagtcgacgccgatgctctcgcacgagtccaggccgaggccgggatgccctattacgcgatgggcgtgtgccacctcgatgtcgccgggggtgacctcgcctggctcgtggactggcagcgcatcggcgagttccaaggatccgagaatctgcccacacccgtccgagaccagcgccgactggccgccatcgccctgcccaccggcaaccgcccggaagctggtcagaccgtcgctgccggggatgaggagattggagtggtggtgtacgtcaccccgtccgccaatcccgatgaggaactcgcgttcgcacttctggatgctcctttctggactcccacccttccgttgaccgtcggtgcccacgacgggaccacggtcaccctgccccgcgtcgtggcagcctccagcctcaacaagctggggtgacagcgatgacgatcactgctgagaacgccaccacccgcagcgacattgcccggagcattgcggtgaccggcgtgggactggtcacggcacagggtgaccataccgacgagtgctggaccgaacttgtcgatggggtttgcggaatcaccatgaacgtcacgttcgatgactctggcaccacgattccgtgtgctggcgtggctcccattccgaactctgattcgatcgaccgctgttacctgctcggcgtccatgccatgcgtgaagctctcgagatgagtggcatcgacctggactccgtgggtcgtgatcgcatcggactcgtggtgggctcaagcctcggcgcgatgcccaccttggaggcggctcatcgccgggccattgagaccggcgtgctcgatgccggattggcggcagactcccagctcccctgcgtcgccgaccacctcgccgctgagttcgacatccgtggaccccgcgtcgtgacatcgaatgcgtgtgccgctggtgccgtggcgatcggctacgccgcagaactcctctggtccgacgatgtggacctggtcgtctgtggcggtgtcgatccactggcccagatctctgccaatgggttcacgtgcctgggagctctcgacaatctcccatgcagcccgatggccggttcctccggtctgactctgggcgagggagccgggttcatggtcctcgagagaacagatgcggcggctgccagaggccaggaggtgatggccgaaatcgccggctacggcacaagttgtgatggttaccaccagactgccccggacccgggtggcaatggcgcccgcagctcaatggaggccgccctgcgctcagctcatctcaagccgtccgacgtcagctacgtcaatctccacggcaccggtactccgaccaacgacgccgtcgagccgaaggcactccggtcattgttcaagtccgatgaccttccccctgtcagttcggtgaagggcgccatcggtcacactctcggcgctgctggcgccatcgaggccgtgtgctcgatcaaggccatccacgagggggtcctgccgccaaccgtcaacaaccgcgggcaggcttcccgaactggtctcgacatcgtgccggagtgcgcacgcaaggccgctcccgacgtggtcatctccaactccttcgccttcgggggcaacaacgcatcagtggtcatcaccgcacctcgaggaggcgttcactgtaccgccccggcgcagcttcgcgaggtcggaatctcaggaatggcagctctggcgggaaaggccgccaactcggaggagcttctttcggccctgtcagaagattgtccaatctggatggccgatgagaagacctgggaaggggatgctgtccaaaccggccatgtggacatcaagcgcctgtcccgcacaatcaacccgtccaaggttcgtcggatggaccccttgggaatcatctccagcgcggtggtgactgatctgtatgcccgacacgggaagctgagccgcaaggatgccgaaagcacgggaatcatcttcgcaaccggctacggtcctgtgacggcggtgacgcagttcaatgacgggatcatccgccacggttccgagggtgccaacgccctggtgttcccgaacaccgtggtcaacgcagccgcaggccacctcgcgatgctgaatcgctaccgtggttacacggccaccttggcatgcggtggaaccagttcactcatggcgctgcttctcgctgctcgcgtcgttggccgcggcgctgcggatcgcatcatggtcgttatcgctgacgagtttcccagcattgccgtccaggccgtcgcaaagcttcctggctaccgacacagggttgatggttccggagccgtgctctcggaaggcgcggtatgcgtcctggtggaggccgtcgaagtcgccgaagcacgcggtaccgcccccatggcgctgctacgcggcttcggatcccgtggagagtccgtgggagtcggtcacaccgcatccgatggacgggcttgggccaaggccatggccgctgcactgggccaggccggcctgactgcctccgacgtgtcgaccgtcgtggcggcatcaagcggacatcctcgcgtcgaccgagccgagcaggcggccaggcggatcgtcggactgtccgcaaccgctacgaccttcccaaaggcgattgtcggagaaacacacggatcggctgccgggatcgggctgttcggtgccctgtgcggttcgaggtcagccgcgcaccagaacatccttgtcaacgccttttcccacggcggtggttatgcctcgatggtggtggagtcactgtgaccacgacgcttctgccacgggttgcccagccgggaccgggcgtcagccatgtcgacaccgaccgtcccatcgagtgcatcatcacccaccacccccacatgccgcgtgatcgcggaggccacgccacctccgtgtcaggcaggtacttgctgcgccaagccgcagaactcatgctcggcacggatcctgcgcattgccccgtcgtcgacccttcgcggcgctggtactggcccggaatcaatcttcacggttctgtctcccatgtcccgggctggagcctgacgacgctgagcaccggcggccacatcggggcagacatccaggacttccgggagcgtcccggcgcaatggcattcatcggtgacctggtcaagctgtcgcgatcggcgtcactccgagaattcgcggagtgcgaggccgtcgtcaaggtgtccgaattgactaaggagacgttcgggcacgtgcgactgcccgaatggacacccggatggcgccacgttttcgaggactactgggtctggagtctcgagatgcacgggatgggagtcatcgcactcgcatccgatctcccccgagccattcgctggtggcggtgcgacgccgatgcccgtggccgtctccaggctctccgacccataagcagtcttggaccaggaaggccgtcatgagccggtactcacgtcgaatctcaggcatcgaacgcggctatctcaacgccgcaacccggggcccgcaccccaccatccacacgatgatcgacttcgagggccgcgtccccgccgactgttggcggcacgcatccacgattgcgtcggccgccaaccctggcatgacagtggtccggaggtcgggccgatggacatccgatccagcgggctgtccggttgtgttccacgactggaccgcggaccccaacgacgttgccgacttccacgctgacatggatctcgtgacgggaccatcgtccacgctccacgttttcgagggggcggaacgcacccgaatcaccttggcagcaagccatgccgtgaccgatgggcggggcatcgaacgatttctcgtcgacctgcttgcagcgttggacgagcgtgaacccattggaagccccgacaccctgaccgatgtcgatatcaaacgatccttggagaacagcatcaagccccgacgccacctggccgctgtgcccgccgatgtcctttctccactgggggggaggaagaaccaacgtatatgggcctccaggacgtggcacagtgccccgggagccatgagcggaagaatcgctgccgctgtggccgagatgatcgaccacgccgcaatgatcatcatcccggttgacatccggcggcacgtcccagaggtccgatccacagcaaacctaagtgcccaactgccagtgatcatcaccccgaaccagcgctggcaaagcatccatgggcatctgctcacggaccttgctcgccatcgagaccttgcgatcatcagtgaggatttccgccacaacaatccgttcgcatcgaccttggaggaaagccaggccatcggcctcgatggtgtctatccctgtgccgcaatcatctccgaccacgggaagctcgacctttcaaggttccagaccttggaactcaccccggtctcgatgcgaagcctcccgatgctcgttccctactccgcaatgttcatcagcagttgcaccgtcggcgagaccaccactgtcaccatcgctcatcgcgctgatgacgatcccgattccataaacaccttcttccaccacatcgaatcccagatgtccatctgagccacgtcgtccctggagagcaaacatgaccacccaagatgtcatcaccccgccgcgccccgtcacctcccatgccacggcgaccaggtccgaggctccaccgcgaagcgtcatcagagccatggccatctcgatggtcgcgaccctcatggtcatgctcgacacgaccgtcgtgaacgtgtccttgagcgcgaccaccgcccgcttcgggagcatgggcagcgtgcagtgggtcctcacaagttacctacttgcactgtgcgcgacgatgacggcctccgcctgggtcatcgaccgccttggtccacggctcaccttcatcgcctcaatgaccatgttcctcatcggctcggtgatgtgtgcactgagcgattcagtgtggcaactcgtcactggcaggaccatctccggtgccggagctgggatccttgttccgacagcatccgtcctgcttatccgtggcatcccacgcgaacaacttggcagggtgcaggcactgaatgggagtgtccagttgatcgctcccctgatcggcccgactgtgggcggtctcctcgttgacaggtgcgggggctggccggccatctactgggcgaacgtccccgtagctcttgttcttctgattgaggccgtccgcgtcgatccggacgaaccacacaccgctaagcgccgcctcgatgctctcggcctggtctgtggcagcaccgcgatcgtgctgacagtgcttggtgtctcactcttcggcaggacgtcgcgaaacaccaccttcctgcttacgatcggcgcgcttgcagtcctcgcatgggcgttcttcatcacccacatccgaagggctaccaaccctctgcttgacgtttccctgtatcagaaccctgtctattcatggtccagcttcaacgtagcggtgcttggtttcggtctctacgcccccatggtcgtcatgcccctctatctcgaggcgacgcgccacctcactgccgtccacactggtctggtgatgtcagtggccggcgtcggcgtcattatggccggaatcctgtgcacgaagatcatgggccggatcggtggaggcctcacgatgacagttggcataactctgagcatcatcgccactctgcccctggcccggctgacgaaccacacctcctacatactcctggcagtctgcttggccttgcgtggagcaggaatcagcctgacaatcgtcccagccatgacacgggccttcgagtccatcaagaggacggccatggcggacgcctctgcacagctcaacctgttgcagcgaatcggcgggacaattgcgacagcagtcatcatcgcagttatccaccacgaggccatgctcacccgcggactctcccccacagtgttctcgcacgccaacgtgtggatcctcaccgcgaccgccgtcacccttctgccggccttcgcgcttgcgaaggccgaaagacaacagcaggatctctgagcaccgaggagtactccctcgtagaccctcctctgatctaattgggttcgttccaagtgtgtatctcactccggggagccccgattgctgaaccacatcccgttcaccctggcgagtccctcgtggtacgacgtcccctgggcgcccggatctccgtatctcacaggagatatctcggtcctgccagcggactcgccaaggtggacgacgaccatccggggtccttggcaaatccacatgccacctcgtccgacccttccagaggtggggtggaaagtgcatgtgtctgccaagccatcggaattggaatcggttgcctcagtcgtagcactgtggtgcgtacgccacagcgtccccttcaaagtacttcgcacccgaggtctcgttcacgcgagtcaagtcaagtatgcggaccgaagtcagagcggcaaggtctgcacctgctaccccgacggcgagagccttgagcacttctgctccggtcttgccgagctgcttcagaacgtcgattcacctccggtgtccggcgagctgcgagtcggatcctcccctctgtggttgcgtcacgggagtttccgagaggcatgggcggtgtcatccacaggagtaccgttcccggtctacccgggaacaacacatcctgatcgtcgaggccccgcgcccgcagaatccgatcacgacacgccgtggatccggaggctccgtcggacgaatcgccccagcacggttcttcccatcgacgatgtcagactcctccaccaatcaaatgctggcggcgtgtatcaggcaacatggagagacggcacatcggtagtcgtcaaggaggcccggcacctgtccggacttgatgcggcgggtgtcgacgcccgagtgcggctgcgtcacgagtacgaggccctgagaagactggacccctatcgggccgctccccatcccattgatctcattgagaccgaggacggctcgttcctgatcatggaattccttgacggaatgacagtccaccaggagatgtcgaggttccatcctctgattggtaggcgacctcatcggctatcgatgaccgatttttcacgctggtgccgagaggtcgaagatcgcttgaggaatgtcacgagggtcatggccgggtgcggaatcgttcacggggatcttcatcccgcgaatctgatacatgtcggccatgaggttttggttactgactttgaatcctgctcaatcgacggggtcgccgtctcgtcagggatcgccgctccctggttccagtcggacgacacgattcccgatccggcgacgactgacgatctccacactcttctcgtggatccgacttgcggccccgcgcttgtcctccatccaaatcttcgcgcgctcatcagccaggccgcagtcgaggacatgatgggaaatccgactggtttaccacatgcctggaacctcgaggacgtgacaagcgaactcgccaaggggatccgggcatcagccactcccgcacgagccgaccgcctctttccctcagacccctacctgttcgggcatccaggttcagaattcggcctgatgcatggcgccgccggaatcatggctgctcttgccgtgactgggtacggtgttgacgcgaatcacgtgacctggatgaaggaccgcttggccacccgcccgaccctgctgccggggttggccaacggaatcgagggaattgccctgggtctctccctgtgcggtcagaacgacatggctgcatccctgctccaccagtccggaattctcacgatcacaacgaacggatcgactgacctcaccctcggtactggtatggcgggccgagcgtgcgcgctgcagtccctctcacaacgactgtcatcgaaatctctcgcccacgctgcatataccctctgggaacaactcgccgtggctgtgcggaacactgatgtggccttgccgaacggcctgttctccggttgggaggggatcgggctctccctgcttgcctctcccctgccggatcgtcatgatctcgcccgccactcactccgactggccctggccacgacaacgattgttgacggtgcgctcttctcaggcgagggacagatccgatggccatatctggggcgtggtcccgcggcatgtggcccgctcgccgccaggcttgatgatgaccagacggccaaggccgtggcacagacctgtcgttgtcccctgactgagtcatccggtctccacaatggccgcgcaggtctcctactcgtcctccgccagctcgtgggagaccaagacgacgccgttcgccgccacctcatgagactgtcgtggtcgatggaccgtcgcgaggaaggcacattgctgctgggtgatcatggcctgcgtttctcatccgatctcgcgacggggtcagccggcgccctcctcgccctgagcagggacccatggcggaacatgacacgaatgctcggaatatgcgatgacacctgtcatggcccactagtgacagtttgatctagcgccgatagttcacaactgaaagactccaaacatcgaggaaaacatgctgagccaaaacgccttggcaggcgtggctcgtttcaccacgatgaacaccaggagacagaatgtccgttgaggccatgcaatccatcgagatggacgaggaaaacagcgccagccagacagtttgcgcttgttacagcttcttctcgtggtcaggatgctgcgtagtctcccaagcggtggaagcatcttgatcgtgtgagacgccgtcgactaccctgtcccccgtggtacgcacacgccccgtcctggacagtcccggaagaccgctcatcgcctccggagtcgtcctggcggtcctgctcatcatcgcggtgatgacgatggtgcttcagcgcgaccccactctcacccccggacgccgcattctcggtatcgtcctgtccacggtccaggccgtcggattcatgtggctgcagacccgcatggttcgtcacggcaagggttcgcgcaacatgcgtgcgacccttggaagggtcggtttctgggccacgtggggactcgtcgcagtgggagtcgtcaatctgtggctgaccaactcgtggaccctcttcggggcctccgtcgccacgcccctccttctcctgccaggggtgtggagtgtggtggccaccctcgtgaccctgatcgtcggtttctccgacctcgtggtcacccacacctcgccactgacctcagccacggtcgtgctggtgaccatcgcggtgtcggtgaacctctacgcattcacgaagctgtcgacggcactcgttgaactccgctcctcccaggaggagatcgcccggctgcgcgtggacgccgagcgtcaccggatatcgcgggacctccacgacatcatcggtcgcaccctggtcgccacgtcgatgcgccagcaggcggccctccacctcgtcgaccgcgacccgcaacgggccaaggaacagctcgacgccgcccatgacgcaatcaccgaggggcagcaccagttgcgttccatcatccaggccgagatgagcaccagcctccccgacgagatcagcgacgccacattcctgtgcgaccgactccacatcgacttccgcatggatgaccgcggcagaccgcacaaacccttcgactcggcggcggcggcggccctgcgcgagggaatcacgaacatgctcaagcacagcgcggcgggctactgccacgtcgccatctccccggacctcctgaccgtcaccaacgacggttgtccgcaatcacctcgcccctccaccacaccgggcaccggaatcgaccatctccggtcccagatcgaggcgctcggtgggtcggtgacgacgtcgcggccctcgcggggcaccttccggctccgctgctccttcccgacccggggggcgtccacgaccacacccgcaaccgaaggaggacgatgacgacgagaatcctcctcgccgaggacatcaaactggtggcagaggccttcgaggcactgctctcggtggaaccggagttcgaggtcgtcgcacgggtggcacgcggcgacgacctggtcacatccgccacccgcctgttccccgacgtgatcctggccgacatcgacatgcccgggatgaccggcatcgaggccacccgaatgcttcgcgacaagggataccgcggcagaatcatcctgctcaccgccctgccgggaagcgggcacctgcacgccgcgatggctgccggagccgacgggtacctgctcaagtcgatcaccgcgccctccctcatcaacgccatccgggcggtgtgcaacggccagtcggccatcgacccgaacgtcgccgcggtcgccatgcgcaagggaccctcgcccctcaacgaccgggaaaccgagattctgcgcctagtcgccgacggttcctccaccgcgcagatcgcctcgcggctgtacctcagcaagggcaccgtcaggaactacctgtcgacggcgatgtcgaagctcgacgccgactcacgcacagcggcggtcacgcgggcacgcgaggagggctggctgtagcaggcgacccgctcagcccaccgcccctcagcccaccgcccctcagcccgccgactcctgacgcacggcctcctcgaccgcccggctgagcagggacccggccctgaccatcgacgtctccgggtccggctcgaggtcggacaacgcgatgatccggtcgaacgcggaccgtttctcctcgggcaggtcacagcgtccgcacaccgcccagacgggcaccccggcgtcccgggcgatcttgcggatggtgtcgagaagcttgccgagcagggtctgctggtccagccgcccctcccccgtgacgacgagactggaggcggagatccgcgacaccgcgcgggaccatcccaggacgaccgccgcgcccgggcggtacctggtccccaggcacatcagcgcccagccgacccggctgggcggctgcgaaccccctggccaccgcccggcaggcctttcccgaactcagcgaccccttgaaggagtcgacggcaacgatgaccggcgcattcggatcaggacgcatgggatcagcatgtcacgtcgatacggagcagtcgcgccgcctacccctagactcgggggcatggtcaaccgagtctacctgtccctgagcgttctcgccctcgtgctgtgggtggtcgcctaccgtcacatgccgggctgggccgcgggcatcaccctggtgggcatcgtcgtgctgtcgctgtggtgcgagtggtcgcgggtgcgcaccctggccaggatcggcaagtcccgccagcagggcccccgctcctcccgaggacgcaacctgtcgtgagcaatacgattcccgcagccctccaccccggccctgacgaggcc

SEQ ID NO: 434 - DNA, 26636 bp, Propionibacterium acnes
  source 1..26636: mol_type = genomic DNA
ccttgtggacaccacgtcatccacatgacttgtgtcacatgattcccggaccatcatcaagcagatgctcacccaactgtaatgatttctgttctgaatctggacatgctctgacctgcattcaatgatcaattccgtgcgatattccacaacgcgcggagaggtcgcagacaatgacaacagaaagcatccccacgcggctgctcgtgtggcacgagcagaccgatccgaccaagctcctcaggatcaccgacgcgatcaggaggggggatccccttccccccatcgaggccatggcgatcggccacaaattcctcgtcctcgacggtgcgcaccgggcccaagcccaccagtactgccatcgatctgagatccgagcccgcctccacaacctccccctcagcgcggaagtaccaggctggagccactccataccccgcgatgcagcagcgaaactggctcacctactcctccccgtggacgctctcggtcaggcggaacatcgtcctgcacggggtgcgccgtcaggtggggaccgcttcacaacgaccgcgcgacatctttctcgcctgccaccggatcgcgcgagttgcctacgcgcatggaatcagacctctcggcccggagttctccaacgctccgacgatcgacgccgccaccatgacctggcccccgccgaacgtgggcacgttgtgggccatcgccagcagtctcggacccctgcccgcaactgtgacccggttcgccccgatcctccggcacgacgccatcggggattccgcgatgacacccgtcacctccgccgcgtgacgacccgcgccaattccgccccaccactggatgaggggcagccgcgtggacgatgctcctgttcaggcagggactccatacgagaccaataggaaaatcatgatcaaaaacacaagccctctgaccgtgaaaaatgtctcgaaaacattccgtggctccagcggagaagccatcaaggccgtgcaagacgtgtcattcaccgttgagcgtggtgaggttgtggcattcctcggcccgaacggcgccgggaagtccaccaccatcgacatggctctcggcctcacccgccccgacagcggccagatcgaggtcttcggtactgacccgctcagcgcggcccggtcgggacgctgcaccgcgatgacacagaccggcgggttgctgcccgacctcacgattgggcagaccatggagatcatctcctcgctctatcgtggctcccacatgaatgcctgcatggagcgagcaaggatcacgcatctggccgatcggcaggtgtcgatgtgctcgggaggcgagcgccaacgacttcgcttcgcactggctctgctgcccgatcctgacttcctcatcctcgacgagcccactgcggggatggatgtggaggcgcgccgggacttctgggcagagatccacgaggacacgcgtcgtggtcggacaattctgttcgcaacgcactacctcgacgaggtggacgagttcgccgatcgggtcatcctcatcaaggagggccgcgtcatcgccgacgacacctccgacgcgatccgcaccatgtcggggggttgcaccgttacggcgaccattcccgacttctccctggcacgactgaatctgccgggcacccaactcatcaagcagggcggcgcacgcgttgatctgcaccatcccgattccgatgccctcgcagcgcgagtcatccagctcggcggcaccgacctgcgcgtggtcccccgcagcctcgacgacgccttcctcgctctcacctcaaccaccaaggagtcctgacatgaccgcccaagcgcttcccgcagtcgccactcccaaggcccgccaccgatccgccatctcgctgaagtacttgtggtgcgagatgcgtcgccccttccggcgttcgacgatgctgttcaacctcgccctccccgcagttctgtacctggccctgttccgcaccgtccacaccgccgagctgccggacgggaacttcgcgatgtggatgatgatcggcatcgctgtctacggagcggccactgcgagcaccagctacgcagcctccatctccgtcgacgaggccaacgggtggacccgcaccatccgcctgacgccgttgtcgtcggtcgggtacgtgctggtgaaggtcctctgcgccatggccatcgccctggccccgaccctgctcatcggtctcatcgggctgttgaccggagctcacggcacgctgcgggtctgggtaatcggactgggggcggcttggctcagctcagcaatcttctccgccttcggcctggctctcggactgtccctgcgtcccgaggtcgtcatgcacgtccccggcctggtcatcaccggtctggcgttcctgggcaacgtcttcgtccccctcagcgggacgatgctcaccattggccgctggagccccgcctacggcatcaccgcgctggctcgttacccgctcaccaacggcatcgacatcgggggcggccacgactccctgacggctgccctcatcggcaccttctgctggttcgccggattcgtgttctgggcctcccgtcgatttaccaagagcacgggtcgtcagtgacagattcggccgatctccggaaggagcagtgttatgaccaagcccctcattgcagtggtcaccgcgggccaaggagcgcagaagcctcgcctgctcacgccatggctcaaggtccccggcgtcacggagaagcttgctgcatggtccgctcaggccgatgtggacctcgtcgagctcggtaccagggcgaatgcagaaaccttggcagcgaccgagaatgcgcagccactactggtctgtctcggagtcctcgtctcggatctcctgaccgaccagaacattgtgctcgcaggacactccgtgggcgagctgacagcagcgtgtctcgccggggtagttgatcccgggacggccgtcactcttgcacgacggcgtggactggccatggcgcgggcctgcgctctccacccgaccaccatggcggccatcattggtgacaatccggatgacgtcctccggcggctctcggaactgggactcacggctgccaacatcaacggaggcggacagattgttgcggccggctccaccgacgcgatcgcggaactggtggcgacccctcccaacgggaccgcagtcaagccgttgcgagttgctggcgcctttcacaccaagtacatgacacctgcgcaggacgctttcgcccaagctgctcaggacgtcaccttctccgacccgcagcacccgatcatctccaacctcgacgggcaggagatccggtccggcaatgacctgcgtgaacggctgattgcccaggtgaccgcgccagttcgatgggatctctgcatccagcagatcgcggatcgtcagccggaactcgccctatcggcccctccggggaaggtgcaggcgtcgctcttgtctcggcagatcccggacctcgcgacggtctgcatcaccacaccacgggaggcagcccaggctgcacagcggatcgaccagtccgtatccgtccttcagggggcatgatgctcatccccgagtacttcctcacagcctgttcggaccatgctgagcgcctggcgatcatcacccacaatgacgttgtgacgtgggccgaactggcgactcgcgtcgacggttttcggcgctggctgcgggaccatggcgtgcaccgccaggacagggtcgttctccagacgccaagcaccgtaggcacggtagccctcatgtgggcctgcctgctcgacggcgtgacgatggtcccggtgcaccaggacctcactgcctcccaggtgcagcaagtcatcgacgactgccgtccagctctggtgtgtggcagcccggacctcgtccaactcctcaactcccccggaatgaagacaagcacacctccaacgcggccggagtcaacgagtattctgccgtccttgtcccgggtcagccccgatgaccttgcgatgctcatctatacgtccggcacgacgggtctcccgaaggggatcatgtgtccccaccggcaggtcgccaccgccgcacggatcgtccatgactgtctcgggtaccgcacggacgacgtcattctctgtcgcctgccgttgtccttcgactacgggctctatcagattctgatgtctgccatctccggtagcgcggttgtcctgcgggacggaggcgcgcaggaccgcaacctggtgcgcgacatcgcccgtcacggcgtcactgtcgttccagtcgtgccgtccatggcgtcaatgctcatcaccctgcagcgtcgtgatcagttgccgaccatcgtcagactgttcacgaataccggggcgcgtctggcacccgagaccgcgaaccagttgctcgcaagcttccccggctcccgctatgcgtcgatgtatggcatgacggagtgcaagcgcatctccatccttccggtggaggagtacgagacgcatccggacagcgtgggaagagctctgcccagcactcacgtcgagatcgttgacgctcagggagttccggttccggcgggcgagcacggggagatcacggtgtccggcccgaccgtgatgaacggctactggcaggtgccgaacagtcccagtggacgattccgacccagcggccacggcctcactctgttcaccggtgatcgcggctggatggatgaggagggacgtctctacctcctcgggcgcgacgacgagatcgtcaagcatcacggcatccgaatcagcctgcaggagatcgagatagccgccgaagccgcgccgggcgtcgacgcagtcatcgctctcaagccggcctccgactcggcccccattgaaatcgcctactgcggcagcacgagtcccgagaacctggcccgccatctcgaaaccgtcctggaccgggcgcgacgaccccaattcatccaccaactccagcagatccccctgacccgtaacgggaaaccaaaccggtcagcagccgccgaggccatccgctcaagggcgtgacggcgaaggccaacacccacagacgaaaggaaaccaccatgacccaggccgagttcaaccagttcatcgagtccacctgctccgcgacgatcgtggatcccgaccgtcctttggtcgatcagggcatcgactccctcggaatgctcaccctcatggtcgctatcgaggacagcctcggcatcgaactggatcccgagtccctcgccgacggtaggggttccacgccctccggtcttctgtcccttgtcgagcagctgaaagcgacggtgtgacgacatgacgacgatggttccttgccgccgtgtggagatgccgcaactgttcgaccacatccccggaagcatctctctctcaggagggctgcccgatctgagcgtgctcccgagcaatcagatcgccgaactgacgtcccggatcatgcgtctcggctcaagaatcctcctgcaatactccaccccttcggtctcgtcctccttggtgccggccatcctggacctggcggaacgaacatgcatgtcaccggatccgcggaatctgatcccgaccgcgggttcccaactgggcctggccatggtgatcaatgcctttgacggcgatgagatcatctgtgactgcgccacctatcccggggcgctggccgccttcgcctctgccggcgtggaaacaacgggggtggccagtgacgaggaggggctcaacccagacgcgctcgctcacgccgtcgcagagggtcgggccaatggccgccgcatcgcagccgtctacaccacgcccaccttccagaatcccaccggctccgtacagtccgagaaccgccgtgcggccctgctcaaggtgtgtgctgacaatgacctcctcctcatcgaggacgatccgtacggcatgctgtccttcgacgggcagacgtggccagctctgaagtccatggacccacagcgcgtcatctacctgggcaccttctcgaaggtgttcgcaccgggcgtccgttccggctggatcgatccgcccgccaatcttgtcgagaaactccgcgctgtgtgcgagatcatgacactctcgccatcagccctcaaccaagcgatcatcggcgagtaccaccgtcgtcacggatgggacgaactgttggagggctatcgcgcctcctaccgcgaccgagcccgtctcctcatcggggctctcgaggctgaactggcaagaacgaattgcactggcacgtggacctggcgtgaaccacggggcggcttctacctgtggttggagaacgtcgccagcaccagcggtatcgacgttgcgcgtcgcgccgccgacaacggagtggccgtggtgcccgggaaacacttcgacgcagccggacacgattcgccgagcctgcgggtgtcgttcagcaattcacgcccggctgatctggtcgaaggagctcgtcgtctcgcccgtgcactggtgggagaggacgttcagaaatgactctcgcgacacgcaccgccaccgacaccctgcagcagaccttgccctggggcacccacgaacgtctcgtcttcgggcgggcgctcctgcgcagcaccggcttcccagccgaaggcttggccctgctcgactccgacgacatcctccccctcctcgactcctttcttgccggggacatcgacagaactcacttcgagaaggaatacaccagtcgcgaggagtccggcgcaagggcgctcatcaacgtcttgaaggacgatgcagtatcgcgcgccatcgcatggcagaaccccaccgcgtggaggtccttcgaatccctgtcgtccacgagcggaatcaatgcttcgactcggcgcaaggtacgccaactcgccctctactggcaacgttactgttccaaggctgagaccattggatacttcggcccgttcgcctgggccgaagtcgacccggaggcctctgcggtcgaattcatctcctccgaccatctgatcgaccgttcccacgtcgcaatggaggcgtgggcggtcattgagatcgggaaagccctggcatcacgggccgaccttcagtggtggatgccaccaatcctgtcccccgccgtcgacctcaacatggagagaggcaccgtgacggtggctggacaccagccacgacgggtccgggaggacgaggcacgagttctcttcctgaccgacggcacccgtcccgccgcccagatcgccaagagcctcgacatggagcccgagcggttgcgcaggatcctcgtggcccatgaacgtcgtcacaccgtgatctgggacgccaacatccctgtctcagtgcacgcgtgggacatcctgcacgaacgcattgcccagatcggagacgctgggctgcgagatgaggccactgctgttctcacgaggttcgacgagcttctggaggtcatccgcaacattcccgacgcccggtccctgacggaggcgacggaatccctgtcccgtcttttcgaaaccgtgacaggaacctcttcgaacagacgtgcgggccaggcatatgcagcccgcagcctgtgctacctggactgcacccgcgccggaaccgccaaggttgggacccggcttctcgaagccctcgacgcccccctcaacctcgtcctacaatccgctgactggttcgcggcgaccttggcaaaggaatacaccaccgaaatcacggacctcgcaaatcgaaagcagcgggcctcccaccagccactgaccatggctgatgtctggccgtccacgatgtcgctgttctggggggactcaccgtccccactgcagcgagccgtgaccgaactgtcacggcggtggagcagagtcctcgaggggctgcagccagtcgacggtcgcatcgacacgacatcgtccgctctctcgggcgccgtggacgagcagttccccgtgtgcaccccgattccagaactgtcagtgcacagcccggacctccaggtcatcacctcgagcactagcaacatcgcctccggacgagtcactgcagtcatgggtgagctacatgcctgtctgagcagtctcgacatgccgttgctcgagtggtcgctgccccatggttccattcgcgatcgcatcaacaccgcgctcaacctgcgacgtctggttcccttgttccccgagacatggaggcgcaacaccggccgcatggttccagcgacggtcggagtgggggatcgcgcaatcgggttcactcggacggccgatcaagaccgtgcgaacacatggtcgatgtcggcactgctgttcgagcagaccgaggacggactcatgatccgtgatcccgatggcaggctctggaccatcgcacaagcgtggagcgtgcccatctccatggtcgccgccgatgcgttcaagatcgggctgcccggctcaccagcccctcggctcaccattgacaatctcgtcgtgttccgtcgtacctggaggtttcccgctggctccatcgacatcatgcacggttcagccgccgagaaacacgctcggctgagggagtggcaggtcacgaatcaccttcctgaccacctcttcgtcaagttcccctccgaacccaagccgatctacttctccttcgagtcccccgccatggccacggtcttcacgcgatcactgcagcgcgacgcccgagagaatccagacagtctcgtgacgatgtccgaagcactgcccgagcctcaatcctcatggctgcacgacacccggagccaccactacgtccacgaattccggctgcaactgaccaaggagcgacatgacgaccacagttgagacacatcccgaaacacgtggcacaaccgcgacatccatctccaatctgatcggtcacacccctctcgtaagaatggaccatctgttcgacggcctccccttcgaggtgtacggcaagctcgagaagctcaatcctggcggaagcatcaaggatcgagcagcacaatccatgatcgaacgggcaattcgacggggtgagatcgtcccgggccgtacgaccgtcatcgagtccagttcgggaaatctcggcatcgccgtggcgatgctgtgccaggagcacggcctgaatttcatctgcgtaaccgatgccaaggccacgccaacgaacattcgactcatcgaagcgttcggggccactgttgaggtgatcgaagaacctcatcccgagagtggcgaattcctccccatgaggctcaagagggtaagagaactgctgtcagagattccagatgcatggtggccgaatcagtacgggaaccccgacaatccggcggctcacgagcggactgtccgcgagatcatcgaggcaatcccgcgggttgacacgattgtctgcgcgaccggctcgtgcggaacccttcgcggctgccacgaagcattgcgaaagctgtccccacgcacccgactcgtcgccgtggacgccaagggcagcgccatcttcgacgaggcaggagcaccccatccccgctgtgtcccgggacacggtgcgtcagtgcgaccgccgctgtggcgcgcggggctcgccgaccaactggttctggtctccgacgcggactgcgtcgtgggatgccaggaggccctgcgcaccgaggctcttctcctcggcggatcctcgggagcaattctgacggccattcaccgagtgtctcccacgattcccgctggttccaccgtggtgacgatcctccccgacggcggcgagcgctacatcgacaccatctacagccgctcgtgggtcgactcacacatccccgggctgccctctctcgccgactggggggctcccaaccccgccaattcgtatgacctgaacagaagtgcctcatgaagctctacaccagagagaccgtcgaaactgcgcttgtcgggcgtcatggccaggttctcagtgccgtacagagtgcatacatgctgcattcgacgggagagacatcgctgccattctcaaccttcctccgcccggccgggtatccgaacgatcggatcatcgcacttcccgcccacatcggaggcgacttcgacatagccggtatcaagtggatctcatccttcccggaaaacctcgaccggggccagcaacgagcttcctccgtactcatcctcaatagtctggagacgggatacccgaccgccctgctggagtccagtcagatttcagcaacgcgaacggcagcatcagccgccctggccagcgccaccctccatggctccgaagaccatgtcagcacgattggcatcatcggctgcgggacaatcaatcttgcaacgatcgactacctcttccacgtgcacccccagatcaacgaggtcctctccttcgatctgaggcgggagcgggcccatgagttctcgcacctcgtcaaggcttcgcacccagaggcccgggtccgtgtcgccaaggagcccgacgagattctggccgcaagcaacaccatcgcgatcgccacgaccgactcgagtcattggttggaccttccgccgtggcacgggccggggcaccaagtcgtcctgcacacgtcgctgcgagacctgtcagtgccctcgatcctggcagcggccaacgtcgttgacgatcctgatcacgtctgccgtgaagcgacgtccttggatctggcaactcagcagaccggcaaccgggacttcatcacggggagaatcggagacctccttcttggcgcgccgctgtcctcaagtcctgactcccgtgtcattttctcacccttcgggctcggcatcctcgacctcgcagtcgcctccgtcgtcattgctgccgcctcctcttcagcagtcgagatcaatgggttcgaccccgggaaacacgccacaagcatgattgaggtgaatcgatgaccaccacacagatcaacgacaacacggccgttctgcgcgacgtattccccgccggctccgtcgcattcgtgagcggtgcctcacgcggaattggcgctgcctgcgcgacagcccttgcggccgcgggatgcaacctcgccatcacttatcgaaggaaggagaacgaggcggcacaaatcgccgaatccattgaagccatcgggcgccagtgcatcacaatgcagatggacgtaaccgatgagaaccaagtgaccagagccttccgcatcattcgccagcattacggacgcctggacgccgcggtcttgaactcgggaatcaccagtgacgggcatcttgcaacaatgagccgctccaagtggagctcggtgatcgacacgaatctgaccggaaccttcctctgcacgcgcgaggcgaccaaggccatgtactcgtccggtggctcgatcgtcatggtcgcgtccaccagtggagttgcagggcgaccgggccaggccaactacgcagccagcaagggcggaatcgttgccatgatgaagacgctggccccggaggttgcggcaaagaacgtccgggtgaatgcggtggcacccggcttcattcagaccgacatggtggcggccgttccaaaagcggcactcgcccaggcaatccaacacatccccatgggccgtcttggcctggcacaggaggttgcgtcagccgttaccttcctggcctccccgctcgccgcctacatcacagggaagaccctcactatcgatggcggaatgatcaacggctgaccccaggacccggacacccccagtaccgagaaaggaacaacaatgaccgagatcacccacactgccaacagcatccgaacccgcgccgaggaacgttccaacaaagcttggcgcctgaaggaggagatcatctccaagctcggtctcgagaccaagccagaatatgtctcggacaaccaaccgctcttcggacgtggccttgagatggattcccttgacactctcgaagtcgtcgtcgccgtcaacaatgagttcggagtctcggtcaacgacgacgacgtacaggcgttcggctcgatcaatgccatggtcgatttcatcgaggtgaacgagaagtgagttctcttgcgctcgaggcgccacccaaggacgcccgtaagaaattcgcctacgacagcgatgccatcaagacgatgctcccacatcgttggccgatgctcatgattgatcgcgcctacgacgtcgtcccagggaaatcgggcaaaggcatcaagtcggtcagcgtcaatgagccgttcttcgccggtcactaccctgaccattccatcatgcccggcgtcatgatcgtcgagtcgatggctcaactcgtggccgtcatctacgtagccgaggccattcagaacaatcccggcatgacgtcgcacgacgcacgttcaagcgttggttatctcggcgcgatccatcagatgaagttccgacgcctcgtcactccgggcgaccaactcaccctccacgcccagctcggcgagaaagtgggggctctgcgcgaggtttccgtgagagcactcaatggccgggatgtcgtcgcccagggggaactcgtcgtcaccgagcggtgacacccagccacacacgagaaggaagtcccatgatcgttcgcccctacaggccacgtgatgcggaagcgatcgtacatctctacaacagccattccgactcccccaatccagtgtcgggagggattgttgaggaggagttccagagggagctcgaagaacgtggttcgacagtgttcctagtggccgaggaggccggatccattgtcggcacattcgggatgttccgcacgaatggccgacacaccatggccgatgatgaagtcttcgccgacatgttctatgtcaccccgtcacatcgactctcgacagttccgggacagctaatcactgaagccatcagcgagtgcttcatccagggcatcaacgtgatccgcctcaccgtgaaccccgcgaacatctccgcgctcaaggtttacagaaaagtcggttgtgcctgtctcggggccaccgatgcaggcgaggacgggaacattgagctgtacaacttcatccctctggttcttagggcaaccatcaccaaactcgaccacgattgtattcgagccctggcggacatgacttcgttcgcctgcatcaccgagggacgtccacttgatctgtcccacgacttcatcgtggacgctggacggaagatcgtctcccacagcatccagatcgggcgttcaaccatccacgccatggtcgacacgggctcgaggaccattgtggaggccaccctcgacaaccgcgactgggatgctcctcgccagatcgtcgcccccaccccctgtcagaaccggcccgaggaacagcgaggcaaccctgtccggctggtgcacaagaagcttgaggtcaccttcaacgaaggagtcattgagatcagtacgactggccactggggcccggtcctcgcaatgtcctggccctcctccgtctcgcaccgcgctcacgggtggcgacagggccccgccaagtcgtatcgatgcgagcttctcgagaattgcctcgtcctggatgacgaaggaggagtgaaatgcaccatcagcctcaatgattgccaagtcgcgatccggatggatggtgccccaaaaacggaattgagaatgtaccagtggtgcagcctgcgccagggctatctgacggctgacaccggcatcacgagcttcaaccgggcatccagtgggctcggagtcgccgtccgggactcgtccgagattgtcgccgcgggccttcccgtcatccctgacacaccgatcacatggagtgagggtgacatcacggttcagctcgatccctgcggccgcgcctccctgatccactcgaccctggtggaccgaagaatccacttggacgagtctggctcggcaagtctcaccatgaccgtgtttggtgactcccagccccatcgtgccgacaccgtcgagctgcctcccctcgcggcaggcaccgacaggatcgtcctcaagccggctgccggaggcgtgaccacatggcgcttgggcgccaccaaggtgctcaagtcaccgtggccacacgcccgcgcgctcgggcccaatccgatctggcgagccggcctgtgggtcagtcacgagccggatcgccacgaccgtcgccaaggaatggggtggggtcccgatcatcgcagttggaccctgtcggaagacaccatgaccagtactgacgggacactctcctggcgcttcagcggctcccccgacaccggctggacggtcgacgtcacgacgagcaacacgcacggggagaccgtcgtctggctcaccccggactgcccggcgggcgagaggatccgcacgtctgatcatgccgtgacgaccatgcttgacatctcgaagccatggcagcgctggaccacccgatgcgcaattcctctcagacacgggaagtggttcctcatcgagcctgatcatgacctcactgattcccccgaaatcctcatgcgctctgttcacggggtcctgctcgtcggctgtgtcggacgagcccactccggatccgcttcctggcgctttgccatcacgtcagaactccccacctccaacccaagaagaaacgactacacctcagccgcctgaacccaaccagttggaacacccactacagaagaaatggagcaccaccatgtccatcactgagcagtacaagacccttcgcacctcggtcggcctccacacgcctaccggtcccctggtccgtatcaccggtgatgatcgtctcgagtttctcgacaccttcctgtcccgcgcctcggacttcgtggaccccgacaccactcgggagtgcctcgctctcaccgaggacggccttccgctgacgatcttcctccacatcgagcgcgaggaggagtcatggctccttccccgcaccgccatcgatgcggcgaccctcgccacgtacctcggcaacctcgagaccgatggtgacctgtcaatcgagattgctccagagggttggggagctgtcgctgtcgaggggccgctgtcgtggcagatcgccgaaaaccttctcgacttcgacgtggctggcctcgttcttcacgccgtcacggacgtcgtcgttcccggggcccccgagggatcgaaggcatggctcgcccgggtcggaaccactggggagtacggctacctgctcgtctccaacgttcccgacctcgcccgcacttatctcctcagccgcgccacggagctgggcggtcaggcagtcgacgccgatgctctcgcacgagtccaggccgaggccgggatgccctattacgcgatgggcgtgtgccacctcgatgtcgccgggggtgacctcgcctggctcgtggactggcagcgcatcggcgagttccaaggatccgagaatctgcccacacccgtccgagaccagcgccgactggccgccatcgccctgcccaccggcaaccgcccggaagctggtcagaccgtcgctgccggggatgaggagattggagtggtggtgtacgtcaccccgtccgccaatcccgatgaggaactcgcgttcgcacttctggatgctcctttctggactcccacccttccgttgaccgtcggtgcccacgacgggaccacggtcaccctgccccgcgtcgtggcagcctccagcctcaacaagctggggtgacagcgatgacgatcactgctgagaacgccaccacccgcagcgacattgcccggagcattgcggtgaccggcgtgggactggtcacggcacagggtgaccataccgacgagtgctggaccgaacttgtcgatggggtttgcggaatcaccatgaacgtcacgttcgatgactctggcaccacgattccgtgtgctggcgtggctcccattccgaactctgattcgatcgaccgctgttacctgctcggcgtccatgccatgcgtgaagctctcgagatgagtggcatcgacctggactccgtgggtcgtgatcgcatcggactcgtggtgggctcaagcctcggcgcgatgcccaccttggaggcggctcatcgccgggccattgagaccggcgtgctcgatgccggattggcggcagactcccagctcccctgcgtcgccgaccacctcgccgctgagttcgacatccgtggaccccgcgtcgtgacatcgaatgcgtgtgccgctggtgccgtggcgatcggctacgccgcagaactcctctggtccgacgatgtggacctggtcgtctgtggcggtgtcgatccactggcccagatctctgccaatgggttcacgtgcctgggagctctcgacaatctcccatgcagcccgatggccggttcctccggtctgactctgggcgagggagccgggttcatggtcctcgagagaacagatgcggcggctgccagaggccaggaggtgatggccgaaatcgccggctacggcacaagttgtgatggttaccaccagactgccccggacccgggtggcaatggcgcccgcagctcaatggaggccgccctgcgctcagctcatctcaagccgtccgacgtcagctacgtcaatctccacggcaccggtactccgaccaacgacgccgtcgagccgaaggcactccggtcattgttcaagtccgatgaccttccccctgtcagttcggtgaagggcgccatcggtcacactctcggcgctgctggcgccatcgaggccgtgtgctcgatcaaggccatccacgagggggtcctgccgccaaccgtcaacaaccgcgggcaggcttcccgaactggtctcgacatcgtgccggagtgcgcacgcaaggccgctcccgacgtggtcatctccaactccttcgccttcgggggcaacaacgcatcagtggtcatcaccgcacctcgaggaggcgttcactgtaccgccccggcgcagcttcgcgaggtcggaatctcaggaatggcagctctggcgggaaaggccgccaactcggaggagcttctttcggccctgtcagaagattgtccaatctggatggccgatgagaagacctgggaaggggatgctgtccaaaccggccatgtggacatcaagcgcctgtcccgcacaatcaacccgtccaaggttcgtcggatggaccccttgggaatcatctccagcgcggtggtgactgatctgtatgcccgacacgggaagctgagccgcaaggatgccgaaagcacgggaatcatcttcgcaaccggctacggtcctgtgacggcggtgacgcagttcaatgacgggatcatccgccacggttccgagggtgccaacgccctggtgttcccgaacaccgtggtcaacgcagccgcaggccacctcgcgatgctgaatcgctaccgtggttacacggccaccttggcatgcggtggaaccagttcactcatggcgctgcttctcgctgctcgcgtcgttggccgcggcgctgcggatcgcatcatggtcgttatcgctgacgagtttcccagcattgccgtccaggccgtcgcaaagcttcctggctaccgacacagggttgatggttccggagccgtgctctcggaaggcgcggtatgcgtcctggtggaggccgtcgaagtcgccgaagcacgcggtaccgcccccatggcgctgctacgcggcttcggatcccgtggagagtccgtgggagtcggtcacaccgcatccgatggacgggcttgggccaaggccatggccgctgcactgggccaggccggcctgactgcctccgacgtgtcgaccgtcgtggcggcatcaagcggacatcctcgcgtcgaccgagccgagcaggcggccaggcggatcgtcggactgtccgcaaccgctacgaccttcccaaaggcgattgtcggagaaacacacggatcggctgccgggatcgggctgttcggtgccctgtgcggttcgaggtcagccgcgcaccagaacatccttgtcaacgccttttcccacggcggtggttatgcctcgatggtggtggagtcactgtgaccacgacgcttctgccacgggttgcccagccgggaccgggcgtcagccatgtcgacaccgaccgtcccatcgagtgcatcatcacccaccacccccacatgccgcgtgatcgcggaggccacgccacctccgtgtcaggcaggtacttgctgcgccaagccgcagaactcatgctcggcacggatcctgcgcattgccccgtcgtcgacccttcgcggcgctggtactggcccggaatcaatcttcacggttctgtctcccatgtcccgggctggagcctgacgacgctgagcaccggcggccacatcggggcagacatccaggacttccgggagcgtcccggcgcaatggcattcatcggtgacctggtcaagctgtcgcgatcggcgtcactccgagaattcgcggagtgcgaggccgtcgtcaaggtgtccgaattgactaaggagacgttcgggcacgtgcgactgcccgaatggacacccggatggcgccacgttttcgaggactactgggtctggagtctcgagatgcacgggatgggagtcatcgcactcgcatccgatctcccccgagccattcgctggtggcggtgcgacgccgatgcccgtggccgtctccaggctctccgacccataagcagtcttggaccaggaaggccgtcatgagccggtactcacgtcgaatctcaggcatcgaacgcggctatctcaacgccgcaacccggggcccgcaccccaccatccacacgatgatcgacttcgagggccgcgtccccgccgactgttggcggcacgcatccacgattgcgtcggccgccaaccctggcatgacagtggtccggaggtcgggccgatggacatccgatccagcgggctgtccggttgtgttccacgactggaccgcggaccccaacgacgttgccgacttccacgctgacatggatctcgtgacgggaccatcgtccacgctccacgttttcgagggggcggaacgcacccgaatcaccttggcagcaagccatgccgtgaccgatgggcggggcatcgaacgatttctcgtcgacctgcttgcagcgttggacgagcgtgaacccattggaagccccgacaccctgaccgatgtcgatatcaaacgatccttggagaacagcatcaagccccgacgccacctggccgctgtgcccgccgatgtcctttctccactgggggggaggaagaaccaacgtatatgggcctccaggacgtggcacagtgccccgggagccatgagcggaagaatcgctgccgctgtggccgagatgatcgaccacgccgcaatgatcatcatcccggttgacatccggcggcacgtcccagaggtccgatccacagcaaacctaagtgcccaactgccagtgatcatcaccccgaaccagcgctggcaaagcatccatgggcatctgctcacggaccttgctcgccatcgagaccttgcgatcatcagtgaggatttccgccacaacaatccgttcgcatcgaccttggaggaaagccaggccatcggcctcgatggtgtctatccctgtgccgcaatcatctccgaccacgggaagctcgacctttcaaggttccagaccttggaactcaccccggtctcgatgcgaagcctcccgatgctcgttccctactccgcaatgttcatcagcagttgcaccgtcggcgagaccaccactgtcaccatcgctcatcgcgctgatgacgatcccgattccataaacaccttcttccaccacatcgaatcccagatgtccatctgagccacgtcgtccctggagagcaaacatgaccacccaagatgtcatcaccccgccgcgccccgtcacctcccatgccacggcgaccaggtccgaggctccaccgcgaagcgtcatcagagccatggccatctcgatggtcgcgaccctcatggtcatgctcgacacgaccgtcgtgaacgtgtccttgagcgcgaccaccgcccgcttcgggagcatgggcagcgtgcagtgggtcctcacaagttacctacttgcactgtgcgcgacgatgacggcctccgcctgggtcatcgaccgccttggtccacggctcaccttcatcgcctcaatgaccatgttcctcatcggctcggtgatgtgtgcactgagcgattcagtgtggcaactcgtcactggcaggaccatctccggtgccggagctgggatccttgttccgacagcatccgtcctgcttatccgtggcatcccacgcgaacaacttggcagggtgcaggcactgaatgggagtgtccagttgatcgctcccctgatcggcccgactgtgggcggtctcctcgttgacaggtgcgggggctggccggccatctactgggcgaacgtccccgtagctcttgttcttctgattgaggccgtccgcgtcgatccggacgaaccacacaccgctaagcgccgcctcgatgctctcggcctggtctgtggcagcaccgcgatcgtgctgacagtgcttggtgtctcactcttcggcaggacgtcgcgaaacaccaccttcctgcttacgatcggcgcgcttgcagtcctcgcatgggcgttcttcatcacccacatccgaagggctaccaaccctctgcttgacgtttccctgtatcagaaccctgtctattcatggtccagcttcaacgtagcggtgcttggtttcggtctctacgcccccatggtcgtcatgcccctctatctcgaggcgacgcgccacctcactgccgtccacactggtctggtgatgtcagtggccggcgtcggcgtcattatggccggaatcctgtgcacgaagatcatgggccggatcggtggaggcctcacgatgacagttggcataactctgagcatcatcgccactctgcccctggtccggctgacgaaccacacctcctacatactcctggcagtctgcttggccttgcgtggagcaggaatcagcctgacaatcgtcccagccatgacacgggccttcgagtccatcaagaggacggccatggcggacgcctctgcacagctcaacctgttgcagcgaatcggcgggacaattgcgacagcagtcatcatcgcagttatccaccacgaggccatgctcacccgcggactctcccccacagtgttctcgcacgccaacgtgtggatcctcaccgcgaccgccgtcacccttctgccggccttcgcgcttgcgaaggccgaaagacaacagcaggatctctgagcaccgaggagtactccctcgtagaccctcctctgatctaattgggttcgttccaagtgtgtatctcactccggggagccccgattgctgaaccacatcccgttcaccctggcgagtccctcgtggtacgacgtcccctgggcgcccggatctccgtatctcacaggagatatctcggtcctgccagcggactcgccaaggtggacgacgaccatccggggtccttggcaaatccacatgccacctcgtccgacccttccagaggtggggtggaaagtgcatgtgtctgccaagccatcggaattggaatcggttgcctcagtcgtagcactgtggtgcgtacgccacagcgtccccttcaaagtacttcgcacccgaggtctcgttcacgcgagtcaagtcaagtatgcggaccgaagtcagagcggcaaggtctgcacctgctaccccgacggcgagagccttgagcacttctgctccggtcttgccgagctgcttcagaacgtcgattcacctccggtgtccggcgagctgcgagtcggatcctcccctctgtggttgcgtcacgggagtttccgagaggcatgggcggtgtcatccacaggagtaccgttcccggtctacccgggaacaacacatcctgatcgtcgaggccccgcgcccgcagaatccgatcacgacacgccgtggatccggaggctccgtcggacgaatcgccccagcacggttcttcccatcgacgatgtcagactcctccaccaatcaaatgctggcggcgtgtatcaggcaacatggagagacggcacatcggtagtcgtcaaggaggcccggcacctgtccggacttgatgcggcgggtgtcgacgcccgagtgcggctgcgtcacgagtacgaggccctgagaagactggacccctatcgggccgctccccatcccattgatctcattgagaccgaggacggctcgttcctgatcatggaattccttgacggaatgacagtccaccaggagatgtcgaggttccatcctctgattggtaggcgacctcatcggctatcgatgaccgatttttcacgctggtgccgagaggtcgaagatcgcttgaggaatgtcacgagggtcatggccgggtgcggaatcgttcacggggatcttcatcccgcgaatctgatacatgtcggccatgaggttttggttactgactttgaatcctgctcaatcgacggggtcgccgtctcgtcagggatcgccgctccctggttccagtcggacgacacgattcccgatccggcgacgactgacgatctccacactcttctcgtggatccgacttgcggccccgcgcttgtcctccatccaaatcttcgcgcgctcatcagccaggccgcagtcgaggacatgatgggaaatccgactggtttaccacatgcctggaacctcgaggacgtgacaagcgaactcgccaaggggatccgggcatcagccactcccgcacgagccgaccgcctctttccctcagacccctacctgttcgggcatccaggttcagaattcggcctgatgcatggcgccgccggaatcatggctgctcttgccgtgactgggtacggtgttgacgcgaatcacgtgacctggatgaaggaccgcttggccacccgcccgaccctgctgccggggttggccaacggaatcgagggaattgccctgggtctctccctgtgcggtcagaacgacatggctgcatccctgctccaccagtccggaattctcacgatcacaacgaacggatcgactgacctcaccctcggtactggtatggcgggccgagcgtgcgcgctgcagtccctctcacaacgactgtcatcgaaatctctcgcccacgctgcatgtaccctctgggaacaactcgccgtggctgtgcggaacactgatgtggccttgccgaacggcctgttctccggttgggaggggatcgggctctccctgcttgcctctcccctgccggatcgtcatgatctcgcccgccactcactccgactggccctggccacgacaacgattgttgacggtgcgctcttctcaggcgagggacagatccgatggccatatctggggcgtggtcccgcggcatgtggcccgctcgccgccaggcttgatgatgaccagacggccaaggccgtggcacagacctgtcgttgtcccctgactgagtcatccggtctccacaatggccgcgcaggtctcctactcgtcctccgccagctcgtgggagaccaagacgacgccgttcgccgccacctcatgagactgtcgtggtcgatggaccgtcgcgaggaaggcacattgctgctgggtgatcatggcctgcgtttctcatccgatctcgcgacggggtcagccggcgccctcctcgccctgagcagggacccatggcggaacatgacacgaatgctcggaatatgcgatgacacctgtcatggcccactagtgacagtttgatctagcgccgatagttcacaactgaaagactccaaacatcgaggaaaacatgctgagccaaaacgccttggcaggcgtggctcgtttcaccacgatgaacaccaggagacagaatgtccgttgaggccatgcaatccatcgagatggacgaggaaaacagcgccagccagacagtttgcgcttgttacagcttcttctcgtggtcaggatgctgcgtagtctcccaagcggtggaagcatcttgatcgtgtgagacgccgtcgactaccctgtcccccgtggtacgcacacgccccgtcctggacagtcccggaagaccgctcatcgcctccggagtcgtcctggcggtcctgctcatcatcgcggtgatgacgatggtgcttcagcgcgaccccactctcacccccggacgccgcattctcggtatcgtcctgtccacggtccaggccgtcggattcatgtggctgcagacccgcatggttcgtcacggcaagggttcgcgcaacatgcgtgcgacccttggaagggtcggtttctgggccacgtggggactcgtcgcagtgggagtcgtcaatctgtggctgaccaactcgtggaccctcttcggggcctccgtcgccacgcccctccttctcctgccaggggtgtggagtgtggtggccaccctcgtgaccctgatcgtcggtttctccgacctcgtggtcacccacacctcgccactgacctcagccacggtcgtgctggtgaccatcgcggtgtcggtgaacctctacgcattcacgaagctgtcgacggcactcgttgaactccgctcctcccaggaggagatcgcccggctgcgcgtggacgccgagcgtcaccggatatcgcgggacctccacgacatcatcggtcgcaccctggtcgccacgtcgatgcgccagcaggcggccctccacctcgtcgaccgcgacccgcaacgggccaaggaacagctcgacgccgcccatgacgcaatcaccgaggggcagcaccagttgcgttccatcatccaggccgagatgagcaccagcctccccgacgagatcagcgacgccacattcctgtgcgaccgactccacatcgacttccgcatggatgaccgcggcagaccgcacaaacccttcgactcggcggcggcggcggccctgcgcgagggaatcacgaacatgctcaagcacagcgcggcgggctactgccacgtcgccatctccccggacctcctgaccgtcaccaacgacggttgtccgcaatcacctcgcccctccaccacaccgggcaccggaatcgaccatctccggtcccagatcgaggcgctcggtgggtcggtgacgacgtcgcggccctcgcggggcaccttccggctccgctgctccttcccgacccggggggcgtccacgaccacacccgcgaccgaaggaggacgatgacgacgagaatcctcctcgccgaggacatcaaactggtggcagaggccttcgaggcactgctctcggtggaaccggagttcgaggtcgtcgcacgggtggcacgcggcgacgacctggtcacatccgccacccgcctgttccccgacgtgatcctggccgacatcgacatgcccgggatgaccggcatcgaggccacccgaatgcttcgcgacaagggataccgcggcagaatcatcctgctcaccgccctgccgggaagcgggcacctgcacgccgcgatggctgccggagccgacgggtacctgctcaagtcgatcaccgcgccctccctcatcaacgccatccgggcggtgtgcaacggccagtcggccatcgacccgaacgtcgccgcggtcgccatgcgcaagggaccctcgcccctcaacgaccgggaaaccgagattctgcgcctagtcgccgacggttcctccaccgcgcagatcgcctcgcggctgtacctcagcaagggcaccgtcaggaactacctgtcgacggcgatgtcgaagctcgacgccgactcacgcacagcggcggtcacgcgggcacgcgaggagggctggctgtagcaggcgacccgctcagcccaccgcccctcagcccaccgcccctcagcccgccgactcctgacgcacggcctcctcgaccgcccagctgagcagggacccggccctgaccatcgacgtctccgggtccggctcgaggtcggacaacgcgatgatccggtcgaacgcggaccgtttctcctcgggcaggtcacagcgtccgcacaccgcccagacgggcaccccggcgtcccgggcgatcttgcggatggtgtcgagaagcttgccgagcagggtctgctggtccagccgcccctcccccgtgacgacgagactggaggcggagatccgcgacaccgcgcgggaccatcccaggacgaccgccgcgcccgggcggtacctggtccccaggcacatcagcgcccagccgacccggctgggcggctgcgaaccccctggccaccgcccggcaggcctttcccgaactcagcgaccccttgaaggagtcgacggcaacgatgaccggcgcattcggatcaggacgcatgggatcagcatgtcacgtcgatacggagcagtcgcgccgcctacccctagactcgggggcatggtcaaccgagtctacctgtccctgagcgttctcgccctcgtgctgtgggtggtcgcctaccgtcacatgccgggctgggccgcgggcatcaccctggtgggcatcgtcgtgctgtcgctgtggtgcgagtggtcgcgggtgcgcaccctggccaggatcggcaagtcccgccagcagggcccccgctcctcccgaggacgcaacctgtcgtgagcaatacgattcccgcagccctccaccccggccctgacgaggcc

SEQ ID NO: 435 - DNA, 20 bp, synthetic construct
  source 1..20: mol_type = other DNA
agrgtttgatcmtggctcag

SEQ ID NO: 436 - DNA, 22 bp, synthetic construct
  source 1..22: mol_type = other DNA
tacggytaccttgttaygactt

SEQ ID NO: 437 - DNA, 18 bp, synthetic construct
  source 1..18: mol_type = other DNA
tgtaaaacgacggccagt

SEQ ID NO: 438 - DNA, 18 bp, synthetic construct
  source 1..18: mol_type = other DNA
caggaaacagctatgacc

SEQ ID NO: 439 - DNA, 20 bp, synthetic construct
  source 1..20: mol_type = other DNA
ccgtcaattcctttragttt

SEQ ID NO: 440 - DNA, 32 bp, synthetic construct
  source 1..32: mol_type = other DNA
catggcctgcacaccaggcgcttttagcacct

SEQ ID NO: 441 - DNA, 32 bp, synthetic construct
  source 1..32: mol_type = other DNA
ggcgtatgacgagttgtggtcggcgtttcctc

SEQ ID NO: 442 - DNA, 32 bp, synthetic construct
  source 1..32: mol_type = other DNA
cggtgttaacggcttgcctggcttggatggag

SEQ ID NO: 443 - DNA, 33 bp, synthetic construct
  source 1..33: mol_type = other DNA
cgcctaccgtcagctgactcacgcctccgcgtt

SEQ ID NO: 444 - DNA, 33 bp, synthetic construct
  source 1..33: mol_type = other DNA
tcacaccagtcatcagcgtcatagtcctctcgg

SEQ ID NO: 445 - DNA, 33 bp, synthetic construct
  source 1..33: mol_type = other DNA
ggctcagccctgcccgatgcctacgccaaatgg

SEQ ID NO: 446 - DNA, 33 bp, synthetic construct; identical to SEQ ID NO: 444
  source 1..33: mol_type = other DNA

SEQ ID NO: 447 - DNA, 33 bp, synthetic construct
  source 1..33: mol_type = other DNA
caccgggcccatcccggtcggcctcctgaaagg

SEQ ID NO: 448 - DNA, 33 bp, synthetic construct
  source 1..33: mol_type = other DNA
gatcgagttggctgagtcgaaggtgttgcggtt

SEQ ID NO: 449 - DNA, 33 bp, synthetic construct
  source 1..33: mol_type = other DNA
ctgctcatcgctcagctcctgcgcctcatcaca

SEQ ID NO: 450 - DNA, 33 bp, synthetic construct
  source 1..33: mol_type = other DNA
ctgcgccaacagccgcatctgatccgaatacgg

SEQ ID NO: 451 - DNA, 33 bp, synthetic construct
  source 1..33: mol_type = other DNA
cgcagcaatctcagaaggccacaacaagttcgt

SEQ ID NO: 452 - DNA, 33 bp, synthetic construct
  source 1..33: mol_type = other DNA
caaatcacccaagcccaacacgccgccaccacc

SEQ ID NO: 453 - DNA, 33 bp, synthetic construct
  source 1..33: mol_type = other DNA
tgtcaccgattcaatgtatctatgagtggtgta

SEQ ID NO: 454 - DNA, 33 bp, synthetic construct
  source 1..33: mol_type = other DNA
ttgggtgggtgaggtcgggtcgtcagtcatgag

SEQ ID NO: 455 - DNA, 33 bp, synthetic construct
  source 1..33: mol_type = other DNA
gtcgatgtcgagattggcctgggggtccatgtc

SEQ ID NO: 456 - DNA, 33 bp, synthetic construct
  source 1..33: mol_type = other DNA
acgtcgtgaacgtaccccttgacggagacggca

SEQ ID NO: 457 - DNA, 33 bp, synthetic construct
  source 1..33: mol_type = other DNA
cgagggctaccacgtggtcgatttggactgtcg

SEQ ID NO: 458 - DNA, 33 bp, synthetic construct
  source 1..33: mol_type = other DNA
caggcgctccactccctcgccctggccaccaac

SEQ ID NO: 459 - DNA, 33 bp, synthetic construct
  source 1..33: mol_type = other DNA
ctatgtggacagtgttggttactgtggggggaa

SEQ ID NO: 460 - DNA, 33 bp, synthetic construct
  source 1..33: mol_type = other DNA
gcactgcaccgatatcgtcgtggctgtcacttg

SEQ ID NO: 461 - DNA, 33 bp, synthetic construct
  source 1..33: mol_type = other DNA
cccagacaacctcgacaacctgttcaggggatg

SEQ ID NO: 462 - DNA, 33 bp, synthetic construct
  source 1..33: mol_type = other DNA
catggctagcccggatttttggctgcctgagcg

SEQ ID NO: 463 - DNA, 33 bp, synthetic construct
  source 1..33: mol_type = other DNA
cggcctgcggcagatttttgttgcgttgaatcc

SEQ ID NO: 464 - DNA, 33 bp, synthetic construct
  source 1..33: mol_type = other DNA
cgggcagaggatgtgttgctcgttcctggatgg

SEQ ID NO: 465 - DNA, 33 bp, synthetic construct
  source 1..33: mol_type = other DNA
gttacgctggaacccccaatgaacacgcgagaa

SEQ ID NO: 466 - DNA, 33 bp, synthetic construct; identical to SEQ ID NO: 457
  source 1..33: mol_type = other DNA

SEQ ID NO: 467 - DNA, 33 bp, synthetic construct; identical to SEQ ID NO: 458
  source 1..33: mol_type = other DNA

SEQ ID NO: 468 - DNA, 20 bp, synthetic construct
  source 1..20: mol_type = other DNA
agagtttgatymtggctcag

SEQ ID NO: 469 - DNA, 22 bp, synthetic construct
  source 1..22: mol_type = other DNA
tacggytaccttgttacgactt

SEQ ID NO: 470 - DNA, 21 bp, synthetic construct
  source 1..21: mol_type = other DNA
gataatccgttcgacaagctg

SEQ ID NO: 471 - DNA, 19 bp, synthetic construct
  source 1..19: mol_type = other DNA
acccaccacgatgatgttt

SEQ ID NO: 472 - DNA, 20 bp, synthetic construct
  source 1..20: mol_type = other DNA
cgacgcctccaataacttcc

SEQ ID NO: 473 - DNA, 18 bp, synthetic construct
  source 1..18: mol_type = other DNA
gtcggcctcctcagcatc

SEQ ID NO: 474 - DNA, 18 bp, synthetic construct
  source 1..18: mol_type = other DNA
ccggagacaacgacaggt

SEQ ID NO: 475 - DNA, 23 bp, synthetic construct
  source 1..23: mol_type = other DNA
gcttcctcataccactggtcatc

SEQ ID NO: 476 - DNA, 33 bp, synthetic construct
  source 1..33: mol_type = other DNA
catctgccaacgagcgagagtggcgcggtgttc

SEQ ID NO: 477 - DNA, 33 bp, synthetic construct; identical to SEQ ID NO: 457
  source 1..33: mol_type = other DNA

SEQ ID NO: 478 - DNA, 33 bp, synthetic construct; identical to SEQ ID NO: 458
  source 1..33: mol_type = other DNA

SEQ ID NO: 479 - DNA, 33 bp, synthetic construct
  source 1..33: mol_type = other DNA
ctgactggtttgggtcatacgtcttctgacacg

SEQ ID NO: 480 - DNA, 33 bp, synthetic construct
  source 1..33: mol_type = other DNA
tcacaggccacgcaggcacatcacccttattag

SEQ ID NO: 481 - DNA, 33 bp, synthetic construct
  source 1..33: mol_type = other DNA
ctccccctcctccccgggaggaaaagcagacca

SEQ ID NO: 482 - DNA, 33 bp, synthetic construct; identical to SEQ ID NO: 457
  source 1..33: mol_type = other DNA

SEQ ID NO: 483 - DNA, 33 bp, synthetic construct; identical to SEQ ID NO: 457
  source 1..33: mol_type = other DNA

SEQ ID NO: 484 - DNA, 33 bp, synthetic construct; identical to SEQ ID NO: 458
  source 1..33: mol_type = other DNA

SEQ ID NO: 485 - DNA, 69 bp, Propionibacterium acnes
  source 1..69: mol_type = genomic DNA
caaccgtagatacagatacatctgaggagatccatgaagaaaaaccgcgcctcaggttcgcaatgaaga

SEQ ID NO: 486 - DNA, 69 bp, Propionibacterium acnes; identical to SEQ ID NO: 485
  source 1..69: mol_type = genomic DNA

SEQ ID NO: 487 - DNA, 69 bp, Propionibacterium acnes; identical to SEQ ID NO: 485
  source 1..69: mol_type = genomic DNA

SEQ ID NO: 488 - DNA, 69 bp, Propionibacterium acnes; identical to SEQ ID NO: 485
  source 1..69: mol_type = genomic DNA

SEQ ID NO: 489 - DNA, 69 bp, Propionibacterium acnes; identical to SEQ ID NO: 485
  source 1..69: mol_type = genomic DNA

SEQ ID NO: 490 - DNA, 69 bp, Propionibacterium acnes; identical to SEQ ID NO: 485
  source 1..69: mol_type = genomic DNA

SEQ ID NO: 491 - DNA, 69 bp, Propionibacterium acnes; identical to SEQ ID NO: 485
  source 1..69: mol_type = genomic DNA

SEQ ID NO: 492 - DNA, 69 bp, Propionibacterium acnes; identical to SEQ ID NO: 485
  source 1..69: mol_type = genomic DNA

SEQ ID NO: 493 - DNA, 69 bp, Propionibacterium acnes; identical to SEQ ID NO: 485
  source 1..69: mol_type = genomic DNA

SEQ ID NO: 494 - DNA, 62 bp, Propionibacterium acnes
  source 1..62: mol_type = genomic DNA
caaccgcagatgcatctgagaagatccatgaagaaaaacccgcctcaggttcgcaatgaaga

SEQ ID NO: 495 - DNA, 62 bp, Propionibacterium acnes; identical to SEQ ID NO: 494
  source 1..62: mol_type = genomic DNA

SEQ ID NO: 496 - DNA, 62 bp, Propionibacterium acnes; identical to SEQ ID NO: 494
  source 1..62: mol_type = genomic DNA

SEQ ID NO: 497 - DNA, 62 bp, Propionibacterium acnes; identical to SEQ ID NO: 494
  source 1..62: mol_type = genomic DNA

SEQ ID NO: 498 - DNA, 62 bp, Propionibacterium acnes; identical to SEQ ID NO: 494
  source 1..62: mol_type = genomic DNA

SEQ ID NO: 499 - DNA, 62 bp, Propionibacterium acnes; identical to SEQ ID NO: 494
  source 1..62: mol_type = genomic DNA

SEQ ID NO: 500 - DNA, 62 bp, Propionibacterium acnes; identical to SEQ ID NO: 494
  source 1..62: mol_type = genomic DNA

SEQ ID NO: 501 - DNA, 62 bp, Propionibacterium acnes; identical to SEQ ID NO: 494
  source 1..62: mol_type = genomic DNA

SEQ ID NO: 502 - DNA, 20 bp, synthetic construct
  source 1..20: mol_type = other DNA
gcaacccgacatcctcatta

SEQ ID NO: 503 - DNA, 20 bp, synthetic construct
  source 1..20: mol_type = other DNA
agtcgaagaagtcgctcagg

SEQ ID NO: 504 - DNA, 22 bp, synthetic construct
  source 1..22: mol_type = other DNA
cgttctacagccaccacgacgg
